United States Patent Application Publication US 2026/0265762 A1 - sequence listing, part 5

SEQ ID NO: 6894 - protein, 2087 aa, synthetic construct
MPAAKRVKLDGGDKKYSIGLDIGTNSVGWAVITDEYKVPSKKFKVLGNTDRHSIKKNLIGALLFDSGETAEATRLKRTARRRYTRRKNRICYLQEIFSNEMAKVDDSFFHRLEESFLVEEDKKHERHPIFGNIVDEVAYHEKYPTIYHLRKKLVDSTDKADLRLIYLALAHMIKFRGHFLIEGDLNPDNSDVDKLFIQLVQTYNQLFEENPINASGVDAKAILSARLSKSRRLENLIAQLPGEKKNGLFGNLIALSLGLTPNFKSNFDLAEDAKLQLSKDTYDDDLDNLLAQIGDQYADLFLAAKNLSDAILLSDILRVNTEITKAPLSASMIKRYDEHHQDLTLLKALVRQQLPEKYKEIFFDQSKNGYAGYIDGGASQEEFYKFIKPILEKMDGTEELLVKLNREDLLRKQRTFDNGSIPHQIHLGELHAILRRQEDFYPFLKDNREKIEKILTFRIPYYVGPLARGNSRFAWMTRKSEETITPWNFEEVVDKGASAQSFIERMTNFDKNLPNEKVLPKHSLLYEYFTVYNELTKVKYVTEGMRKPAFLSGEQKKAIVDLLFKTNRKVTVKQLKEDYFKKIECFDSVEISGVEDRFNASLGTYHDLLKIIKDKDFLDNEENEDILEDIVLTLTLFEDREMIEERLKTYAHLFDDKVMKQLKRRRYTGWGRLSRKLINGIRDKQSGKTILDFLKSDGFANRNFMQLIHDDSLTFKEDIQKAQVSGQGDSLHEHIANLAGSPAIKKGILQTVKVVDELVKVMGRHKPENIVIEMARENQTTQKGQKNSRERMKRIEEGIKELGSQILKEHPVENTQLQNEKLYLYYLQNGRDMYVDQELDINRLSDYDVDHIVPQSFLKDDSIDNKVLTRSDKARGKSDNVPSEEVVKKMKNYWRQLLNAKLITQRKFDNLTKAERGGLSELDKAGFIKRQLVETRQITKHVAQILDSRMNTKYDENDKLIREVKVITLKSKLVSDFRKDFQFYKVREINNYHHAHDAYLNAVVGTALIKKYPKLESEFVYGDYKVYDVRKMIAKSEQEIGKATAKYFFYSNIMNFFKTEITLANGEIRKRPLIETNGETGEIVWDKGRDFATVRKVLSMPQVNIVKKTEVQTGGFSKESILPKRNSDKLIARKKDWDPKKYGGFDSPTVAYSVLVVAKVEKGKSKKLKSVKELLGITIMERSSFEKNPIDFLEAKGYKEVKKDLIIKLPKYSLFELENGRKRMLASAGELQKGNELALPSKYVNFLYLASHYEKLKGSPEDNEQKQLFVEQHKHYLDEIIEQISEFSKRVILADANLDKVLSAYNKHRDKPIREQAENIIHLFTLTNLGAPAAFKYFDTTIDRKRYTSTKEVLDATLIHQSITGLYETRIDLSQLGGDGGGGSGGGEAAAKGGIPWLMKKPLQLTTLVPLQEYEERLLKQTMLTGSYKEKLQSLFLKYDALWQHWENQVGHRRIKPHHIATGTVNPRPQKQYPINPKAKASIQTVINDLLKQGVLIQQNSIMNTPVYPVPKPDGKWRMVLDYREVNKTIPLIAAQNQHSAGILSSIFRGKYKTTLDLSNGFWAHSITPESYWLTAFTWLGQQYCWTRLPQGFLNSPALFNADVVDLLKEVPNVQVYVDDIYISHDDPREHLEQLEKVFSLLLNAGYVVSLKKSEIAQHEVEFLGFNITKEGRGLTETFKQKLLNITPPRDLKQLQSILGLLNFARNFIPNFSELVKPLYNIIATAPGKYITWTTDNSQQLQNIISMLNSAENLEERNPEVRLIMKVNTSPSAGYIRFYNEFAKRPIMYLNYVYTKAEVKFTNTEKLLTTIHKGLIKALDLGMGQEILVYSPIVSMTKIQKTPLPERKALPIRWITWMSYLEDPRIQFHYDKTLPELQQVPTVTDDIIAKIKHPSEFSMVFYTDGSAIKHPNVNKSHNAGMGIAQVQFKPEFTVINTWSIPLGDHTAQLAEVAAVEFACKKALKIDGPVLIVTDSFYVAESVNKELPYWQSNGFFNNKKKPLKHVSKWKSIADCIQLKPDIIIIHEKGHQPTASTFHTEGNNLADKLATQGSYVVNAGKRTADGSEFEKRTADGSEFESPKKKAKVE

SEQ ID NO: 6895 - protein, 2176 aa, synthetic construct
MPAAKRVKLDGGDKKYSIGLDIGTNSVGWAVITDEYKVPSKKFKVLGNTDRHSIKKNLIGALLFDSGETAEATRLKRTARRRYTRRKNRICYLQEIFSNEMAKVDDSFFHRLEESFLVEEDKKHERHPIFGNIVDEVAYHEKYPTIYHLRKKLVDSTDKADLRLIYLALAHMIKFRGHFLIEGDLNPDNSDVDKLFIQLVQTYNQLFEENPINASGVDAKAILSARLSKSRRLENLIAQLPGEKKNGLFGNLIALSLGLTPNFKSNFDLAEDAKLQLSKDTYDDDLDNLLAQIGDQYADLFLAAKNLSDAILLSDILRVNTEITKAPLSASMIKRYDEHHQDLTLLKALVRQQLPEKYKEIFFDQSKNGYAGYIDGGASQEEFYKFIKPILEKMDGTEELLVKLNREDLLRKQRTFDNGSIPHQIHLGELHAILRRQEDFYPFLKDNREKIEKILTFRIPYYVGPLARGNSRFAWMTRKSEETITPWNFEEVVDKGASAQSFIERMTNFDKNLPNEKVLPKHSLLYEYFTVYNELTKVKYVTEGMRKPAFLSGEQKKAIVDLLFKTNRKVTVKQLKEDYFKKIECFDSVEISGVEDRFNASLGTYHDLLKIIKDKDFLDNEENEDILEDIVLTLTLFEDREMIEERLKTYAHLFDDKVMKQLKRRRYTGWGRLSRKLINGIRDKQSGKTILDFLKSDGFANRNFMQLIHDDSLTFKEDIQKAQVSGQGDSLHEHIANLAGSPAIKKGILQTVKVVDELVKVMGRHKPENIVIEMARENQTTQKGQKNSRERMKRIEEGIKELGSQILKEHPVENTQLQNEKLYLYYLQNGRDMYVDQELDINRLSDYDVDHIVPQSFLKDDSIDNKVLTRSDKARGKSDNVPSEEVVKKMKNYWRQLLNAKLITQRKFDNLTKAERGGLSELDKAGFIKRQLVETRQITKHVAQILDSRMNTKYDENDKLIREVKVITLKSKLVSDFRKDFQFYKVREINNYHHAHDAYLNAVVGTALIKKYPKLESEFVYGDYKVYDVRKMIAKSEQEIGKATAKYFFYSNIMNFFKTEITLANGEIRKRPLIETNGETGEIVWDKGRDFATVRKVLSMPQVNIVKKTEVQTGGFSKESILPKRNSDKLIARKKDWDPKKYGGFDSPTVAYSVLVVAKVEKGKSKKLKSVKELLGITIMERSSFEKNPIDFLEAKGYKEVKKDLIIKLPKYSLFELENGRKRMLASAGELQKGNELALPSKYVNFLYLASHYEKLKGSPEDNEQKQLFVEQHKHYLDEIIEQISEFSKRVILADANLDKVLSAYNKHRDKPIREQAENIIHLFTLTNLGAPAAFKYFDTTIDRKRYTSTKEVLDATLIHQSITGLYETRIDLSQLGGDGGGGSGGGEAAAKGGMDPLQLLQPLEAEIKGTKLKAHWNSGATITCVPQAFLEEEVPIKNIWIKTIHGEKEQPVYYLTFKIQGRKVEAEVISSPYDYILVSPSDIPWLMKKPLQLTTLVPLQEYEERLLKQTMLTGSYKEKLQSLFLKYDALWQHWENQVGHRRIKPHHIATGTVNPRPQKQYPINPKAKASIQTVINDLLKQGVLIQQNSIMNTPVYPVPKPDGKWRMVLDYREVNKTIPLIAAQNQHSAGILSSIFRGKYKTTLDLSNGFWAHSITPESYWLTAFTWLGQQYCWTRLPQGFLNSPALFNADVVDLLKEVPNVQVYVDDIYISHDDPREHLEQLEKVFSLLLNAGYVVSLKKSEIAQHEVEFLGFNITKEGRGLTETFKQKLLNITPPRDLKQLQSILGLLNFARNFIPNFSELVKPLYNIIATAPGKYITWTTDNSQQLQNIISMLNSAENLEERNPEVRLIMKVNTSPSAGYIRFYNEFAKRPIMYLNYVYTKAEVKFTNTEKLLTTIHKGLIKALDLGMGQEILVYSPIVSMTKIQKTPLPERKALPIRWITWMSYLEDPRIQFHYDKTLPELQQVPTVTDDIIAKIKHPSEFSMVFYTDGSAIKHPNVNKSHNAGMGIAQVQFKPEFTVINTWSIPLGDHTAQLAEVAAVEFACKKALKIDGPVLIVTDSFYVAESVNKELPYWQSNGFFNNKKKPLKHVSKWKSIADCIQLKPDIIIIHEKGHQPTASTFHTEGNNLADKLATQGSYVVNAGKRTADGSEFEKRTADGSEFESPKKKAKVE

SEQ ID NO: 6896 - protein, 2094 aa, synthetic construct
MPAAKRVKLDGGDKKYSIGLDIGTNSVGWAVITDEYKVPSKKFKVLGNTDRHSIKKNLIGALLFDSGETAEATRLKRTARRRYTRRKNRICYLQEIFSNEMAKVDDSFFHRLEESFLVEEDKKHERHPIFGNIVDEVAYHEKYPTIYHLRKKLVDSTDKADLRLIYLALAHMIKFRGHFLIEGDLNPDNSDVDKLFIQLVQTYNQLFEENPINASGVDAKAILSARLSKSRRLENLIAQLPGEKKNGLFGNLIALSLGLTPNFKSNFDLAEDAKLQLSKDTYDDDLDNLLAQIGDQYADLFLAAKNLSDAILLSDILRVNTEITKAPLSASMIKRYDEHHQDLTLLKALVRQQLPEKYKEIFFDQSKNGYAGYIDGGASQEEFYKFIKPILEKMDGTEELLVKLNREDLLRKQRTFDNGSIPHQIHLGELHAILRRQEDFYPFLKDNREKIEKILTFRIPYYVGPLARGNSRFAWMTRKSEETITPWNFEEVVDKGASAQSFIERMTNFDKNLPNEKVLPKHSLLYEYFTVYNELTKVKYVTEGMRKPAFLSGEQKKAIVDLLFKTNRKVTVKQLKEDYFKKIECFDSVEISGVEDRFNASLGTYHDLLKIIKDKDFLDNEENEDILEDIVLTLTLFEDREMIEERLKTYAHLFDDKVMKQLKRRRYTGWGRLSRKLINGIRDKQSGKTILDFLKSDGFANRNFMQLIHDDSLTFKEDIQKAQVSGQGDSLHEHIANLAGSPAIKKGILQTVKVVDELVKVMGRHKPENIVIEMARENQTTQKGQKNSRERMKRIEEGIKELGSQILKEHPVENTQLQNEKLYLYYLQNGRDMYVDQELDINRLSDYDVDHIVPQSFLKDDSIDNKVLTRSDKARGKSDNVPSEEVVKKMKNYWRQLLNAKLITQRKFDNLTKAERGGLSELDKAGFIKRQLVETRQITKHVAQILDSRMNTKYDENDKLIREVKVITLKSKLVSDFRKDFQFYKVREINNYHHAHDAYLNAVVGTALIKKYPKLESEFVYGDYKVYDVRKMIAKSEQEIGKATAKYFFYSNIMNFFKTEITLANGEIRKRPLIETNGETGEIVWDKGRDFATVRKVLSMPQVNIVKKTEVQTGGFSKESILPKRNSDKLIARKKDWDPKKYGGFDSPTVAYSVLVVAKVEKGKSKKLKSVKELLGITIMERSSFEKNPIDFLEAKGYKEVKKDLIIKLPKYSLFELENGRKRMLASAGELQKGNELALPSKYVNFLYLASHYEKLKGSPEDNEQKQLFVEQHKHYLDEIIEQISEFSKRVILADANLDKVLSAYNKHRDKPIREQAENIIHLFTLTNLGAPAAFKYFDTTIDRKRYTSTKEVLDATLIHQSITGLYETRIDLSQLGGDGGGGSGGGEAAAKGGVLNLEEEYRLHEKPVPSSIDPSWLQLFPTVWAERAGMGLANQVPPVVVELRSGASPVAVRQYPMSKEAREGIRPHIQRFLDLGVLVPCQSPWNTPLLPVKKPGTNDYRPVQDLREINKRVQDIHPTVPNPYNLLSSLPPSHTWYSVLDLKDAFFCLKLHPNSQPLFAFEWRDPEKGNTGQLTWTRLPQGFKNSPTLFNEALHRDLAPFRALNPQVVLLQYVDDLLVAAPTYRDCKEGTQKLLQELSKLGYRVSAKKAQLCQKEVTYLGYLLKEGKRWLTPARKATVMKIPPPTTPRQVREFLGKAGFCRLFIPGFASLAAPLYPLTKPSIPFIWTEEHQKAFDRIKEALLSAPALALPDLTKPFTLYVDERAGVARGVLTQTLGPWRRPVAYLSKKLDPVASGWPTCLKAVAAVALLLKDADKLTLGQNVTVIASHSLESIVRQPPDRWMTNARMTHYQSLLLNERVSFAPPAVLNPATLLPVESEATPVHRCSEILAEETGTRRDLKDQPLPGVPAWYTDGSSFIAEGKRRAGAAIVDGKRTVWASSLPEGTSAQKAELVALTQALRLAEGKDINIYTDSRYAFATAHIHGAIYKQRGWLTSAGKDIKNKEEILALLEAIHLPKRVAIIHCPGHQKGNDPVATGNRRADEAAKQAALSTRVLAETTKPAGKRTADGSEFEKRTADGSEFESPKKKAKVE

SEQ ID NO: 6897 - protein, 2096 aa, synthetic construct
MPAAKRVKLDGGDKKYSIGLDIGTNSVGWAVITDEYKVPSKKFKVLGNTDRHSIKKNLIGALLFDSGETAEATRLKRTARRRYTRRKNRICYLQEIFSNEMAKVDDSFFHRLEESFLVEEDKKHERHPIFGNIVDEVAYHEKYPTIYHLRKKLVDSTDKADLRLIYLALAHMIKFRGHFLIEGDLNPDNSDVDKLFIQLVQTYNQLFEENPINASGVDAKAILSARLSKSRRLENLIAQLPGEKKNGLFGNLIALSLGLTPNFKSNFDLAEDAKLQLSKDTYDDDLDNLLAQIGDQYADLFLAAKNLSDAILLSDILRVNTEITKAPLSASMIKRYDEHHQDLTLLKALVRQQLPEKYKEIFFDQSKNGYAGYIDGGASQEEFYKFIKPILEKMDGTEELLVKLNREDLLRKQRTFDNGSIPHQIHLGELHAILRRQEDFYPFLKDNREKIEKILTFRIPYYVGPLARGNSRFAWMTRKSEETITPWNFEEVVDKGASAQSFIERMTNFDKNLPNEKVLPKHSLLYEYFTVYNELTKVKYVTEGMRKPAFLSGEQKKAIVDLLFKTNRKVTVKQLKEDYFKKIECFDSVEISGVEDRFNASLGTYHDLLKIIKDKDFLDNEENEDILEDIVLTLTLFEDREMIEERLKTYAHLFDDKVMKQLKRRRYTGWGRLSRKLINGIRDKQSGKTILDFLKSDGFANRNFMQLIHDDSLTFKEDIQKAQVSGQGDSLHEHIANLAGSPAIKKGILQTVKVVDELVKVMGRHKPENIVIEMARENQTTQKGQKNSRERMKRIEEGIKELGSQILKEHPVENTQLQNEKLYLYYLQNGRDMYVDQELDINRLSDYDVDHIVPQSFLKDDSIDNKVLTRSDKARGKSDNVPSEEVVKKMKNYWRQLLNAKLITQRKFDNLTKAERGGLSELDKAGFIKRQLVETRQITKHVAQILDSRMNTKYDENDKLIREVKVITLKSKLVSDFRKDFQFYKVREINNYHHAHDAYLNAVVGTALIKKYPKLESEFVYGDYKVYDVRKMIAKSEQEIGKATAKYFFYSNIMNFFKTEITLANGEIRKRPLIETNGETGEIVWDKGRDFATVRKVLSMPQVNIVKKTEVQTGGFSKESILPKRNSDKLIARKKDWDPKKYGGFDSPTVAYSVLVVAKVEKGKSKKLKSVKELLGITIMERSSFEKNPIDFLEAKGYKEVKKDLIIKLPKYSLFELENGRKRMLASAGELQKGNELALPSKYVNFLYLASHYEKLKGSPEDNEQKQLFVEQHKHYLDEIIEQISEFSKRVILADANLDKVLSAYNKHRDKPIREQAENIIHLFTLTNLGAPAAFKYFDTTIDRKRYTSTKEVLDATLIHQSITGLYETRIDLSQLGGDGGGGSGGGEAAAKGGTLNIEDEYRLHETSKEPDVPLGSTWLSDFPQAWAETGGMGLAVRQAPLIIPLKATSTPVSIKQYPMSQEARLGIKPHIQRLLDQGILVPCQSPWNTPLLPVKKPGTNDYRPVQDLREVNKRVEDIHPTVPNPYNLLSGLPPSHQWYTVLDLKDAFFCLRLHPTSQPLFAFEWRDPEMGISGQLTWTRLPQGFKNSPTLFNEALHRDLADFRIQHPDLILLQYVDDLLLAATSEQDCQRGTRALLQTLGNLGYRASAKKAQICQKQVKYLGYLLKEGQRWLTEARKETVMGQPTPKTPRQLREFLGTAGFCRLWIPGFAEMAAPLYPLTKPGTLFNWGPDQQKAYQEIKQALLTAPALGLPDLTKPFELFVDEKQGYAKGVLTQKLGPWRRPVAYLSKKLDPVAAGWPPCLRMVAAIAVLTKDAGKLTMGQPLVILAPHAVEALVKQPPDRWLSNARMTHYQAMLLDTDRVQFGPVVALNPATLLPLPEKEAPHDCLEILAETHGTRPDLTDQPIPDADYTWYTDGSSFLQEGQRRAGAAVTTETEVIWARALPAGTSAQRAELIALTQALKMAEGKKLNVYTDSRYAFATAHVHGEIYRRRGWLTSEGREIKNKNEILALLKALFLPKRLSIIHCPGHQKGNSAEARGNRMADQAAREAAMKAVLETSTLLAGKRTADGSEFEKRTADGSEFESPKKKAKVE

SEQ ID NO: 6898 - protein, 2098 aa, synthetic construct
MPAAKRVKLDGGDKKYSIGLDIGTNSVGWAVITDEYKVPSKKFKVLGNTDRHSIKKNLIGALLFDSGETAEATRLKRTARRRYTRRKNRICYLQEIFSNEMAKVDDSFFHRLEESFLVEEDKKHERHPIFGNIVDEVAYHEKYPTIYHLRKKLVDSTDKADLRLIYLALAHMIKFRGHFLIEGDLNPDNSDVDKLFIQLVQTYNQLFEENPINASGVDAKAILSARLSKSRRLENLIAQLPGEKKNGLFGNLIALSLGLTPNFKSNFDLAEDAKLQLSKDTYDDDLDNLLAQIGDQYADLFLAAKNLSDAILLSDILRVNTEITKAPLSASMIKRYDEHHQDLTLLKALVRQQLPEKYKEIFFDQSKNGYAGYIDGGASQEEFYKFIKPILEKMDGTEELLVKLNREDLLRKQRTFDNGSIPHQIHLGELHAILRRQEDFYPFLKDNREKIEKILTFRIPYYVGPLARGNSRFAWMTRKSEETITPWNFEEVVDKGASAQSFIERMTNFDKNLPNEKVLPKHSLLYEYFTVYNELTKVKYVTEGMRKPAFLSGEQKKAIVDLLFKTNRKVTVKQLKEDYFKKIECFDSVEISGVEDRFNASLGTYHDLLKIIKDKDFLDNEENEDILEDIVLTLTLFEDREMIEERLKTYAHLFDDKVMKQLKRRRYTGWGRLSRKLINGIRDKQSGKTILDFLKSDGFANRNFMQLIHDDSLTFKEDIQKAQVSGQGDSLHEHIANLAGSPAIKKGILQTVKVVDELVKVMGRHKPENIVIEMARENQTTQKGQKNSRERMKRIEEGIKELGSQILKEHPVENTQLQNEKLYLYYLQNGRDMYVDQELDINRLSDYDVDHIVPQSFLKDDSIDNKVLTRSDKARGKSDNVPSEEVVKKMKNYWRQLLNAKLITQRKFDNLTKAERGGLSELDKAGFIKRQLVETRQITKHVAQILDSRMNTKYDENDKLIREVKVITLKSKLVSDFRKDFQFYKVREINNYHHAHDAYLNAVVGTALIKKYPKLESEFVYGDYKVYDVRKMIAKSEQEIGKATAKYFFYSNIMNFFKTEITLANGEIRKRPLIETNGETGEIVWDKGRDFATVRKVLSMPQVNIVKKTEVQTGGFSKESILPKRNSDKLIARKKDWDPKKYGGFDSPTVAYSVLVVAKVEKGKSKKLKSVKELLGITIMERSSFEKNPIDFLEAKGYKEVKKDLIIKLPKYSLFELENGRKRMLASAGELQKGNELALPSKYVNFLYLASHYEKLKGSPEDNEQKQLFVEQHKHYLDEIIEQISEFSKRVILADANLDKVLSAYNKHRDKPIREQAENIIHLFTLTNLGAPAAFKYFDTTIDRKRYTSTKEVLDATLIHQSITGLYETRIDLSQLGGDGGGGSEAAAKGGGGGTAPLEEEYRLFLEAPIQNVTLLEQWKREIPKVWAEINPPGLASTQAPIHVQLLSTALPVRVRQYPITLEAKRSLRETIRKFRAAGILRPVHSPWNTPLLPVRKSGTSEYRMVQDLREVNKRVETIHPTVPNPYTLLSLLPPDRIWYSVLDLKDAFFCIPLAPESQLIFAFEWADAEEGESGQLTWTRLPQGFKNSPTLFNEALNRDLQGFRLDHPSVSLLQYVDDLLIAADTQAACLSATRDLLMTLAELGYRVSGKKAQLCQEEVTYLGFKIHKGSRSLSNSRTQAILQIPVPKTKRQVREFLGTIGYCRLWIPGFAELAQPLYAATRPGNDPLVWGEKEEEAFQSLKLALTQPPALALPSLDKPFQLFVEETSGAAKGVLTQALGPWKRPVAYLSKRLDPVAAGWPRCLRAIAAAALLTREASKLTFGQDIEITSSHNLESLLRSPPDKWLTNARITQYQVLLLDPPRVRFKQTAALNPATLLPETDDTLPIHHCLDTLDSLTSTRPDLTDQPLAQAEATLFTDGSSYIRDGKRYAGAAVVTLDSVIWAEPLPIGTSAQKAELIALTKALEWSKDKSVNIYTDSRYAFATLHVHGMIYRERGWLTAGGKAIKNAPEILALLTAVWLPKRVAVMHCKGHQKDDAPTSTGNRRADEVAREVAIRPLSTQATISAGKRTADGSEFEKRTADGSEFESPKKKAKVE

SEQ ID NO: 6899 - protein, 2102 aa, synthetic construct
MPAAKRVKLDGGDKKYSIGLDIGTNSVGWAVITDEYKVPSKKFKVLGNTDRHSIKKNLIGALLFDSGETAEATRLKRTARRRYTRRKNRICYLQEIFSNEMAKVDDSFFHRLEESFLVEEDKKHERHPIFGNIVDEVAYHEKYPTIYHLRKKLVDSTDKADLRLIYLALAHMIKFRGHFLIEGDLNPDNSDVDKLFIQLVQTYNQLFEENPINASGVDAKAILSARLSKSRRLENLIAQLPGEKKNGLFGNLIALSLGLTPNFKSNFDLAEDAKLQLSKDTYDDDLDNLLAQIGDQYADLFLAAKNLSDAILLSDILRVNTEITKAPLSASMIKRYDEHHQDLTLLKALVRQQLPEKYKEIFFDQSKNGYAGYIDGGASQEEFYKFIKPILEKMDGTEELLVKLNREDLLRKQRTFDNGSIPHQIHLGELHAILRRQEDFYPFLKDNREKIEKILTFRIPYYVGPLARGNSRFAWMTRKSEETITPWNFEEVVDKGASAQSFIERMTNFDKNLPNEKVLPKHSLLYEYFTVYNELTKVKYVTEGMRKPAFLSGEQKKAIVDLLFKTNRKVTVKQLKEDYFKKIECFDSVEISGVEDRFNASLGTYHDLLKIIKDKDFLDNEENEDILEDIVLTLTLFEDREMIEERLKTYAHLFDDKVMKQLKRRRYTGWGRLSRKLINGIRDKQSGKTILDFLKSDGFANRNFMQLIHDDSLTFKEDIQKAQVSGQGDSLHEHIANLAGSPAIKKGILQTVKVVDELVKVMGRHKPENIVIEMARENQTTQKGQKNSRERMKRIEEGIKELGSQILKEHPVENTQLQNEKLYLYYLQNGRDMYVDQELDINRLSDYDVDHIVPQSFLKDDSIDNKVLTRSDKARGKSDNVPSEEVVKKMKNYWRQLLNAKLITQRKFDNLTKAERGGLSELDKAGFIKRQLVETRQITKHVAQILDSRMNTKYDENDKLIREVKVITLKSKLVSDFRKDFQFYKVREINNYHHAHDAYLNAVVGTALIKKYPKLESEFVYGDYKVYDVRKMIAKSEQEIGKATAKYFFYSNIMNFFKTEITLANGEIRKRPLIETNGETGEIVWDKGRDFATVRKVLSMPQVNIVKKTEVQTGGFSKESILPKRNSDKLIARKKDWDPKKYGGFDSPTVAYSVLVVAKVEKGKSKKLKSVKELLGITIMERSSFEKNPIDFLEAKGYKEVKKDLIIKLPKYSLFELENGRKRMLASAGELQKGNELALPSKYVNFLYLASHYEKLKGSPEDNEQKQLFVEQHKHYLDEIIEQISEFSKRVILADANLDKVLSAYNKHRDKPIREQAENIIHLFTLTNLGAPAAFKYFDTTIDRKRYTSTKEVLDATLIHQSITGLYETRIDLSQLGGDGGGGSEAAAKGGGGGTVSLQDEHRLFDIPVTTSLPDVWLQDFPQAWAETGGLGRAKCQAPIIIDLKPTAVPVSIKQYPMSLEAHMGIRQHIIKFLELGVLRPCRSPWNTPLLPVKKPGTQDYRPVQDLREINKRTVDIHPTVPNPYNLLSTLKPDYSWYTVLDLKDAFFCLPLAPQSQELFAFEWKDPERGISGQLTWTRLPQGFKNSPTLFNEALHRDLTDFRTQHPEVTLLQYVDDLLLAAPTKKACTQGTRHLLQELGEKGYRASAKKAQICQTKVTYLGYILSEGKRWLTPGRIETVARIPPPRNPREVREFLGTAGFCRLWIPGFAELAAPLYALTKPSTPFTWQTEHQLAFEALKKALLSAPALGLPDTSKPFTLFLDERQGIAKGVLTQKLGPWKRPVAYLSKKLDPVAAGWPPCLRIMAATAMLVKDSAKLTLGQPLTVITPHTLEAIVRQPPDRWITNARLTHYQALLLDTDRVQFGPPVTLNPATLLPVPENQPSPHDCRQVLAETHGTREDLKDQELPDADHTWYTDGSSYLDSGTRRAGAAVVDGHNTIWAQSLPPGTSAQKAELIALTKALELSKGKKANIYTDSRYAFATAHTHGSIYERRGWLTSEGKEIKNKAEIIALLKALFLPQEVAIIHCPGHQKGQDPVAVGNRQADRVARQAAMAEVLTLATEPDNTSHITAGKRTADGSEFEKRTADGSEFESPKKKAKVE

SEQ ID NO: 6900 - protein, 2087 aa, synthetic construct
MPAAKRVKLDGGDKKYSIGLDIGTNSVGWAVITDEYKVPSKKFKVLGNTDRHSIKKNLIGALLFDSGETAEATRLKRTARRRYTRRKNRICYLQEIFSNEMAKVDDSFFHRLEESFLVEEDKKHERHPIFGNIVDEVAYHEKYPTIYHLRKKLVDSTDKADLRLIYLALAHMIKFRGHFLIEGDLNPDNSDVDKLFIQLVQTYNQLFEENPINASGVDAKAILSARLSKSRRLENLIAQLPGEKKNGLFGNLIALSLGLTPNFKSNFDLAEDAKLQLSKDTYDDDLDNLLAQIGDQYADLFLAAKNLSDAILLSDILRVNTEITKAPLSASMIKRYDEHHQDLTLLKALVRQQLPEKYKEIFFDQSKNGYAGYIDGGASQEEFYKFIKPILEKMDGTEELLVKLNREDLLRKQRTFDNGSIPHQIHLGELHAILRRQEDFYPFLKDNREKIEKILTFRIPYYVGPLARGNSRFAWMTRKSEETITPWNFEEVVDKGASAQSFIERMTNFDKNLPNEKVLPKHSLLYEYFTVYNELTKVKYVTEGMRKPAFLSGEQKKAIVDLLFKTNRKVTVKQLKEDYFKKIECFDSVEISGVEDRFNASLGTYHDLLKIIKDKDFLDNEENEDILEDIVLTLTLFEDREMIEERLKTYAHLFDDKVMKQLKRRRYTGWGRLSRKLINGIRDKQSGKTILDFLKSDGFANRNFMQLIHDDSLTFKEDIQKAQVSGQGDSLHEHIANLAGSPAIKKGILQTVKVVDELVKVMGRHKPENIVIEMARENQTTQKGQKNSRERMKRIEEGIKELGSQILKEHPVENTQLQNEKLYLYYLQNGRDMYVDQELDINRLSDYDVDHIVPQSFLKDDSIDNKVLTRSDKARGKSDNVPSEEVVKKMKNYWRQLLNAKLITQRKFDNLTKAERGGLSELDKAGFIKRQLVETRQITKHVAQILDSRMNTKYDENDKLIREVKVITLKSKLVSDFRKDFQFYKVREINNYHHAHDAYLNAVVGTALIKKYPKLESEFVYGDYKVYDVRKMIAKSEQEIGKATAKYFFYSNIMNFFKTEITLANGEIRKRPLIETNGETGEIVWDKGRDFATVRKVLSMPQVNIVKKTEVQTGGFSKESILPKRNSDKLIARKKDWDPKKYGGFDSPTVAYSVLVVAKVEKGKSKKLKSVKELLGITIMERSSFEKNPIDFLEAKGYKEVKKDLIIKLPKYSLFELENGRKRMLASAGELQKGNELALPSKYVNFLYLASHYEKLKGSPEDNEQKQLFVEQHKHYLDEIIEQISEFSKRVILADANLDKVLSAYNKHRDKPIREQAENIIHLFTLTNLGAPAAFKYFDTTIDRKRYTSTKEVLDATLIHQSITGLYETRIDLSQLGGDGGGGSEAAAKGGGGGVPWILKKPLELTIKLDLEEQQGTLLNNSILSKKGKEELKQLFEKYSALWQSWENQVGHRRIRPHKIATGTVKPTPQKQYHINPKAKPDIQIVINDLLKQGVLIQKESTMNTPVYPVPKPNGRWRMVLDYRAVNKVTPLIAVQNQHSYGILGSLFKGRYKTTIDLSNGFWAHPIVPEDYWITAFTWQGKQYCWTVLPQGFLNSPGLFTGDVVDLLQGIPNVEVYVDDVYISHDSEKEHLEYLDILFNRLKEAGYIISLKKSNIANSIVDFLGFQITNEGRGLTDTFKEKLENITAPTTLKQLQSILGLLNFARNFIPDFTELIAPLYALIPKSTKNYVPWQIEHSTTLETLITKLNGAEYLQGRKGDKTLIMKVNASYTTGYIRYYNEGEKKPISYVSIVFSKTELKFTELEKLLTTVHKGLLKALDLSMGQNIHVYSPIVSMQNIQKTPQTAKKALASRWLSWLSYLEDPRIRFFYDPQMPALKDLPAVDTGKDNKKHPSNFQHIFYTDGSAITSPTKEGHLNAGMGIVYFINKDGNLQKQQEWSISLGNHTAQFAEIAAFEFALKKCLPLGGNILVVTDSNYVAKAYNEELDVWASNGFVNNRKKPLKHISKWKSVADLKRLRPDVVVTHEPGHQKLDSSPHAYGNNLADQLATQASFKVHAGKRTADGSEFEKRTADGSEFESPKKKAKVE

SEQ ID NO: 6901 - protein, 2096 aa, synthetic construct
MPAAKRVKLDGGDKKYSIGLDIGTNSVGWAVITDEYKVPSKKFKVLGNTDRHSIKKNLIGALLFDSGETAEATRLKRTARRRYTRRKNRICYLQEIFSNEMAKVDDSFFHRLEESFLVEEDKKHERHPIFGNIVDEVAYHEKYPTIYHLRKKLVDSTDKADLRLIYLALAHMIKFRGHFLIEGDLNPDNSDVDKLFIQLVQTYNQLFEENPINASGVDAKAILSARLSKSRRLENLIAQLPGEKKNGLFGNLIALSLGLTPNFKSNFDLAEDAKLQLSKDTYDDDLDNLLAQIGDQYADLFLAAKNLSDAILLSDILRVNTEITKAPLSASMIKRYDEHHQDLTLLKALVRQQLPEKYKEIFFDQSKNGYAGYIDGGASQEEFYKFIKPILEKMDGTEELLVKLNREDLLRKQRTFDNGSIPHQIHLGELHAILRRQEDFYPFLKDNREKIEKILTFRIPYYVGPLARGNSRFAWMTRKSEETITPWNFEEVVDKGASAQSFIERMTNFDKNLPNEKVLPKHSLLYEYFTVYNELTKVKYVTEGMRKPAFLSGEQKKAIVDLLFKTNRKVTVKQLKEDYFKKIECFDSVEISGVEDRFNASLGTYHDLLKIIKDKDFLDNEENEDILEDIVLTLTLFEDREMIEERLKTYAHLFDDKVMKQLKRRRYTGWGRLSRKLINGIRDKQSGKTILDFLKSDGFANRNFMQLIHDDSLTFKEDIQKAQVSGQGDSLHEHIANLAGSPAIKKGILQTVKVVDELVKVMGRHKPENIVIEMARENQTTQKGQKNSRERMKRIEEGIKELGSQILKEHPVENTQLQNEKLYLYYLQNGRDMYVDQELDINRLSDYDVDHIVPQSFLKDDSIDNKVLTRSDKARGKSDNVPSEEVVKKMKNYWRQLLNAKLITQRKFDNLTKAERGGLSELDKAGFIKRQLVETRQITKHVAQILDSRMNTKYDENDKLIREVKVITLKSKLVSDFRKDFQFYKVREINNYHHAHDAYLNAVVGTALIKKYPKLESEFVYGDYKVYDVRKMIAKSEQEIGKATAKYFFYSNIMNFFKTEITLANGEIRKRPLIETNGETGEIVWDKGRDFATVRKVLSMPQVNIVKKTEVQTGGFSKESILPKRNSDKLIARKKDWDPKKYGGFDSPTVAYSVLVVAKVEKGKSKKLKSVKELLGITIMERSSFEKNPIDFLEAKGYKEVKKDLIIKLPKYSLFELENGRKRMLASAGELQKGNELALPSKYVNFLYLASHYEKLKGSPEDNEQKQLFVEQHKHYLDEIIEQISEFSKRVILADANLDKVLSAYNKHRDKPIREQAENIIHLFTLTNLGAPAAFKYFDTTIDRKRYTSTKEVLDATLIHQSITGLYETRIDLSQLGGDGGGGSEAAAKGGGGGTLNLEDEYRLYETSAEPEVSPGSTWLSDFPQAWAETGGMGLAVRQAPLIIPLKATSTPVSIKQYPMSQEAKLGIKPHIQRLLDQGILVPCQSPWNTPLLPVKKPGTNDYRPVQDLREVNKRVEDIHPTVPNPYNLLSGLPPSHRWYTVLDLKDAFFCLRLHPTSQPLFAFEWRDPGMGISGQLTWTRLPQGFKNSPTLFNEALHRDLADFRIQHPDLILLQYVDDILLAATSELDCQQGTRALLLTLGNLGYRASAKKAQLCQKQVKYLGYLLKEGQRWLTEARKETVMGQPTPKTPRQLREFLGTAGFCRLWIPGFAEMAAPLYPLTKPGTLFNWGPDQQKAYQEIKQALLTAPALGLPDLTKPFELFVDEKQGYAKGVLTQKLGPWRRPVAYLSKKLDPVAAGWPPCLRMVAAIAVLRKDAGKLTMGQPLVILAPHAVEALVKQPPDRWLSNARMTHYQAMLLDTDRVQFGPVVALNPATLLPLPEEGAPHDCLEILAETHGTRPDLTDQPIPDADHTWYTDGSSFLQEGQRKAGAAVTTETEVIWARALPAGTSAQRAELIALTQALKMAEGKRLNVYTDSRYAFATAHIHGEIYRRRGWLTSEGREIKNKSEILALLKALFLPKRLSIIHCLGHQKGDSAEARGNRLADQAAREAAIKTPPDTSTLLAGKRTADGSEFEKRTADGSEFESPKKKAKVE

SEQ ID NO: 6902 - protein, 2096 aa, synthetic construct
MPAAKRVKLDGGDKKYSIGLDIGTNSVGWAVITDEYKVPSKKFKVLGNTDRHSIKKNLIGALLFDSGETAEATRLKRTARRRYTRRKNRICYLQEIFSNEMAKVDDSFFHRLEESFLVEEDKKHERHPIFGNIVDEVAYHEKYPTIYHLRKKLVDSTDKADLRLIYLALAHMIKFRGHFLIEGDLNPDNSDVDKLFIQLVQTYNQLFEENPINASGVDAKAILSARLSKSRRLENLIAQLPGEKKNGLFGNLIALSLGLTPNFKSNFDLAEDAKLQLSKDTYDDDLDNLLAQIGDQYADLFLAAKNLSDAILLSDILRVNTEITKAPLSASMIKRYDEHHQDLTLLKALVRQQLPEKYKEIFFDQSKNGYAGYIDGGASQEEFYKFIKPILEKMDGTEELLVKLNREDLLRKQRTFDNGSIPHQIHLGELHAILRRQEDFYPFLKDNREKIEKILTFRIPYYVGPLARGNSRFAWMTRKSEETITPWNFEEVVDKGASAQSFIERMTNFDKNLPNEKVLPKHSLLYEYFTVYNELTKVKYVTEGMRKPAFLSGEQKKAIVDLLFKTNRKVTVKQLKEDYFKKIECFDSVEISGVEDRFNASLGTYHDLLKIIKDKDFLDNEENEDILEDIVLTLTLFEDREMIEERLKTYAHLFDDKVMKQLKRRRYTGWGRLSRKLINGIRDKQSGKTILDFLKSDGFANRNFMQLIHDDSLTFKEDIQKAQVSGQGDSLHEHIANLAGSPAIKKGILQTVKVVDELVKVMGRHKPENIVIEMARENQTTQKGQKNSRERMKRIEEGIKELGSQILKEHPVENTQLQNEKLYLYYLQNGRDMYVDQELDINRLSDYDVDHIVPQSFLKDDSIDNKVLTRSDKARGKSDNVPSEEVVKKMKNYWRQLLNAKLITQRKFDNLTKAERGGLSELDKAGFIKRQLVETRQITKHVAQILDSRMNTKYDENDKLIREVKVITLKSKLVSDFRKDFQFYKVREINNYHHAHDAYLNAVVGTALIKKYPKLESEFVYGDYKVYDVRKMIAKSEQEIGKATAKYFFYSNIMNFFKTEITLANGEIRKRPLIETNGETGEIVWDKGRDFATVRKVLSMPQVNIVKKTEVQTGGFSKESILPKRNSDKLIARKKDWDPKKYGGFDSPTVAYSVLVVAKVEKGKSKKLKSVKELLGITIMERSSFEKNPIDFLEAKGYKEVKKDLIIKLPKYSLFELENGRKRMLASAGELQKGNELALPSKYVNFLYLASHYEKLKGSPEDNEQKQLFVEQHKHYLDEIIEQISEFSKRVILADANLDKVLSAYNKHRDKPIREQAENIIHLFTLTNLGAPAAFKYFDTTIDRKRYTSTKEVLDATLIHQSITGLYETRIDLSQLGGDGGGGSEAAAKGGGGGTLNIEDEYRLHETSKGPDVPLGSTWLSDFPQAWAETGGMGLAVRQAPLIIPLKATSTPVSIKQYPMSQEARLGIKPHIQRLLDQGILVPCQSPWNTPLLPVKKPGTNDYRPVQDLREVNKRVEDIHPTVPNPYNLLSGLPPSHQWYTVLDLKDAFFCLRLHPTSQSLFAFEWRDPEMGISGQLTWTRLPQGFKNSPTLFNEALHRDLADFRIQHPDLILLQYVDDLLLAATSELDCQQGTRALLQTLGDLGYRASAKKAQICQKQVKYLGYLLKEGQRWLTEARKETVMGQPTPKTPRQLREFLGTAGFCRLWIPGFAEMAAPLYPLTKPGTLFEWGPDQQKAYQEIKQALLTAPALGLPDLTKPFELFVDEKQGYAKGVLTQKLGPWRRPVAYLSKKLDPVAAGWPPCLRMVAAIAVLTKDAGKLTMGQPLVILAPHAVEALVKQPPDRWLSNARMTHYQALLLDTDRVQFGPIVALNPATLLPLPEEGLQHDCLDILAEAHGTRPDLTDQPLPDADHTWYTDGSSFLQEGQRKAGAAVTTETEVVWAKALPAGTSAQRAELIALTQALKMAEGKKLNVYTDSRYAFATAHIHGEIYRRRGWLTSEGKEIKNKDEILALLKALFLPKRLSIIHCPGHQKGNRAEARGNRMADQAAREVATRETPETSTLLAGKRTADGSEFEKRTADGSEFESPKKKAKVE

SEQ ID NO: 6903 - protein, 2096 aa, synthetic construct
MPAAKRVKLDGGDKKYSIGLDIGTNSVGWAVITDEYKVPSKKFKVLGNTDRHSIKKNLIGALLFDSGETAEATRLKRTARRRYTRRKNRICYLQEIFSNEMAKVDDSFFHRLEESFLVEEDKKHERHPIFGNIVDEVAYHEKYPTIYHLRKKLVDSTDKADLRLIYLALAHMIKFRGHFLIEGDLNPDNSDVDKLFIQLVQTYNQLFEENPINASGVDAKAILSARLSKSRRLENLIAQLPGEKKNGLFGNLIALSLGLTPNFKSNFDLAEDAKLQLSKDTYDDDLDNLLAQIGDQYADLFLAAKNLSDAILLSDILRVNTEITKAPLSASMIKRYDEHHQDLTLLKALVRQQLPEKYKEIFFDQSKNGYAGYIDGGASQEEFYKFIKPILEKMDGTEELLVKLNREDLLRKQRTFDNGSIPHQIHLGELHAILRRQEDFYPFLKDNREKIEKILTFRIPYYVGPLARGNSRFAWMTRKSEETITPWNFEEVVDKGASAQSFIERMTNFDKNLPNEKVLPKHSLLYEYFTVYNELTKVKYVTEGMRKPAFLSGEQKKAIVDLLFKTNRKVTVKQLKEDYFKKIECFDSVEISGVEDRFNASLGTYHDLLKIIKDKDFLDNEENEDILEDIVLTLTLFEDREMIEERLKTYAHLFDDKVMKQLKRRRYTGWGRLSRKLINGIRDKQSGKTILDFLKSDGFANRNFMQLIHDDSLTFKEDIQKAQVSGQGDSLHEHIANLAGSPAIKKGILQTVKVVDELVKVMGRHKPENIVIEMARENQTTQKGQKNSRERMKRIEEGIKELGSQILKEHPVENTQLQNEKLYLYYLQNGRDMYVDQELDINRLSDYDVDHIVPQSFLKDDSIDNKVLTRSDKARGKSDNVPSEEVVKKMKNYWRQLLNAKLITQRKFDNLTKAERGGLSELDKAGFIKRQLVETRQITKHVAQILDSRMNTKYDENDKLIREVKVITLKSKLVSDFRKDFQFYKVREINNYHHAHDAYLNAVVGTALIKKYPKLESEFVYGDYKVYDVRKMIAKSEQEIGKATAKYFFYSNIMNFFKTEITLANGEIRKRPLIETNGETGEIVWDKGRDFATVRKVLSMPQVNIVKKTEVQTGGFSKESILPKRNSDKLIARKKDWDPKKYGGFDSPTVAYSVLVVAKVEKGKSKKLKSVKELLGITIMERSSFEKNPIDFLEAKGYKEVKKDLIIKLPKYSLFELENGRKRMLASAGELQKGNELALPSKYVNFLYLASHYEKLKGSPEDNEQKQLFVEQHKHYLDEIIEQISEFSKRVILADANLDKVLSAYNKHRDKPIREQAENIIHLFTLTNLGAPAAFKYFDTTIDRKRYTSTKEVLDATLIHQSITGLYETRIDLSQLGGDGGGGSEAAAKGGGGGTLNIEDEYRLHEISTEPDVSPGSTWLSDFPQAWAETGGMGLAVRQAPLIIPLKATSTPVSIKQYPMSQEAKLGIKPHIQRLLDQGILVPCQSPWNTPLLPVKKPGTNDYRPVQGLREVNKRVEDIHPTVPNPYNLLSGLPTSHRWYTVLDLKDAFFCLRLHPTSQPLFASEWRDPGMGISGQLTWTRLPQGFKNSPTLFNEALHRGLADFRIQHPDLILLQYVDDLLLAATSELDCQQGTRALLKTLGNLGYRASAKKAQICQKQVKYLGYLLREGQRWLTEARKETVMGQPTPKTPRQLREFLGTAGFCRLWIPRFAEMAAPLYPLTKPGTLFNWGPDQQKAYHEIKQALLTAPALGLPDLTKPFELFVDEKQGYAKGVLTQKLGPWRRPVAYLSKKLDPVAAGWPPCLRMVAAIAVLTKDAGKLTMGQPLVILAPHAVEALVKQPPDRWLSNARMTHYQAMLLDTDRVQFGPVVALNPATLLPLPEEGAPHDCLEILAETHGTEPDLTDQPIPDADHTWYTDGSSFLQEGQRKAGAAVTTETEVIWARALPAGTSAQRAELIALTQALKMAEGKRLNVYTDSRYAFATAHIHGEIYKRRGWLTSEGREIKNKSEILALLKALFLPKRLSIIHCLGHQKGDSAEARGNRLADQAAREAAIKTPPDTSTLLAGKRTADGSEFEKRTADGSEFESPKKKAKVE

SEQ ID NO: 6904 - protein, 2090 aa, synthetic construct
MPAAKRVKLDGGDKKYSIGLDIGTNSVGWAVITDEYKVPSKKFKVLGNTDRHSIKKNLIGALLFDSGETAEATRLKRTARRRYTRRKNRICYLQEIFSNEMAKVDDSFFHRLEESFLVEEDKKHERHPIFGNIVDEVAYHEKYPTIYHLRKKLVDSTDKADLRLIYLALAHMIKFRGHFLIEGDLNPDNSDVDKLFIQLVQTYNQLFEENPINASGVDAKAILSARLSKSRRLENLIAQLPGEKKNGLFGNLIALSLGLTPNFKSNFDLAEDAKLQLSKDTYDDDLDNLLAQIGDQYADLFLAAKNLSDAILLSDILRVNTEITKAPLSASMIKRYDEHHQDLTLLKALVRQQLPEKYKEIFFDQSKNGYAGYIDGGASQEEFYKFIKPILEKMDGTEELLVKLNREDLLRKQRTFDNGSIPHQIHLGELHAILRRQEDFYPFLKDNREKIEKILTFRIPYYVGPLARGNSRFAWMTRKSEETITPWNFEEVVDKGASAQSFIERMTNFDKNLPNEKVLPKHSLLYEYFTVYNELTKVKYVTEGMRKPAFLSGEQKKAIVDLLFKTNRKVTVKQLKEDYFKKIECFDSVEISGVEDRFNASLGTYHDLLKIIKDKDFLDNEENEDILEDIVLTLTLFEDREMIEERLKTYAHLFDDKVMKQLKRRRYTGWGRLSRKLINGIRDKQSGKTILDFLKSDGFANRNFMQLIHDDSLTFKEDIQKAQVSGQGDSLHEHIANLAGSPAIKKGILQTVKVVDELVKVMGRHKPENIVIEMARENQTTQKGQKNSRERMKRIEEGIKELGSQILKEHPVENTQLQNEKLYLYYLQNGRDMYVDQELDINRLSDYDVDHIVPQSFLKDDSIDNKVLTRSDKARGKSDNVPSEEVVKKMKNYWRQLLNAKLITQRKFDNLTKAERGGLSELDKAGFIKRQLVETRQITKHVAQILDSRMNTKYDENDKLIREVKVITLKSKLVSDFRKDFQFYKVREINNYHHAHDAYLNAVVGTALIKKYPKLESEFVYGDYKVYDVRKMIAKSEQEIGKATAKYFFYSNIMNFFKTEITLANGEIRKRPLIETNGETGEIVWDKGRDFATVRKVLSMPQVNIVKKTEVQTGGFSKESILPKRNSDKLIARKKDWDPKKYGGFDSPTVAYSVLVVAKVEKGKSKKLKSVKELLGITIMERSSFEKNPIDFLEAKGYKEVKKDLIIKLPKYSLFELENGRKRMLASAGELQKGNELALPSKYVNFLYLASHYEKLKGSPEDNEQKQLFVEQHKHYLDEIIEQISEFSKRVILADANLDKVLSAYNKHRDKPIREQAENIIHLFTLTNLGAPAAFKYFDTTIDRKRYTSTKEVLDATLIHQSITGLYETRIDLSQLGGDGGGGSEAAAKGGGGGTLQLDDEYRLYSPLVKPDQNIQFWLEQFPQAWAETAGMGLAKQVPPQVIQLKASATPVSVRQYPLSKEAQEGIRPHVQRLIQQGILVPVQSPWNTPLLPVRKPGTNDYRPVQDLREVNKRVQDIHPTVPNPYNLLCALPPQRSWYTVLDLKDAFFCLRLHPTSQPLFAFEWRDPGTGRTGQLTWTRLPQGFKNSPTIFDEALHRDLANFRIQHPQVTLLQYVDDLLLAGATKQDCLEGTKALLLELSDLGYRASAKKAQICRREVTYLGYSLRDGQRWLTEARKKTVVQIPAPTTAKQVREFLGTAGFCRLWIPGFATLAAPLYPLTKEKGEFSWAPEHQKAFDAIKKALLSAPALALPDVTKPFTLYVDERKGVARGVLTQTLGPWRRPVAYLSKKLDPVASGWPVCLKAIAAVAILVKDADKLTLGQNITVIAPHALENIVRQPPDRWMTNARMTHYQSLLLTERVTFAPPAALNPATLLPEETDEPVTHDCHQLLIEETGVRKDLTDIPLTGEVLTWFTDGSSYVVEGKRMAGAAVVDGTRTIWASSLPEGTSAQKAELMALTQALRLAEGKSINIYTDSRYAFATAHVHGAIYKQRGLLTSAGREIKNKEEILSLLEALHLPKRLAIIHCPGHQKAKDPISRGNQMADRVAKQAAQGVNLLAGKRTADGSEFEKRTADGSEFESPKKKAKVE

SEQ ID NO: 6905 - protein, 2096 aa, synthetic construct
MPAAKRVKLDGGDKKYSIGLDIGTNSVGWAVITDEYKVPSKKFKVLGNTDRHSIKKNLIGALLFDSGETAEATRLKRTARRRYTRRKNRICYLQEIFSNEMAKVDDSFFHRLEESFLVEEDKKHERHPIFGNIVDEVAYHEKYPTIYHLRKKLVDSTDKADLRLIYLALAHMIKFRGHFLIEGDLNPDNSDVDKLFIQLVQTYNQLFEENPINASGVDAKAILSARLSKSRRLENLIAQLPGEKKNGLFGNLIALSLGLTPNFKSNFDLAEDAKLQLSKDTYDDDLDNLLAQIGDQYADLFLAAKNLSDAILLSDILRVNTEITKAPLSASMIKRYDEHHQDLTLLKALVRQQLPEKYKEIFFDQSKNGYAGYIDGGASQEEFYKFIKPILEKMDGTEELLVKLNREDLLRKQRTFDNGSIPHQIHLGELHAILRRQEDFYPFLKDNREKIEKILTFRIPYYVGPLARGNSRFAWMTRKSEETITPWNFEEVVDKGASAQSFIERMTNFDKNLPNEKVLPKHSLLYEYFTVYNELTKVKYVTEGMRKPAFLSGEQKKAIVDLLFKTNRKVTVKQLKEDYFKKIECFDSVEISGVEDRFNASLGTYHDLLKIIKDKDFLDNEENEDILEDIVLTLTLFEDREMIEERLKTYAHLFDDKVMKQLKRRRYTGWGRLSRKLINGIRDKQSGKTILDFLKSDGFANRNFMQLIHDDSLTFKEDIQKAQVSGQGDSLHEHIANLAGSPAIKKGILQTVKVVDELVKVMGRHKPENIVIEMARENQTTQKGQKNSRERMKRIEEGIKELGSQILKEHPVENTQLQNEKLYLYYLQNGRDMYVDQELDINRLSDYDVDHIVPQSFLKDDSIDNKVLTRSDKARGKSDNVPSEEVVKKMKNYWRQLLNAKLITQRKFDNLTKAERGGLSELDKAGFIKRQLVETRQITKHVAQILDSRMNTKYDENDKLIREVKVITLKSKLVSDFRKDFQFYKVREINNYHHAHDAYLNAVVGTALIKKYPKLESEFVYGDYKVYDVRKMIAKSEQEIGKATAKYFFYSNIMNFFKTEITLANGEIRKRPLIETNGETGEIVWDKGRDFATVRKVLSMPQVNIVKKTEVQTGGFSKESILPKRNSDKLIARKKDWDPKKYGGFDSPTVAYSVLVVAKVEKGKSKKLKSVKELLGITIMERSSFEKNPIDFLEAKGYKEVKKDLIIKLPKYSLFELENGRKRMLASAGELQKGNELALPSKYVNFLYLASHYEKLKGSPEDNEQKQLFVEQHKHYLDEIIEQISEFSKRVILADANLDKVLSAYNKHRDKPIREQAENIIHLFTLTNLGAPAAFKYFDTTIDRKRYTSTKEVLDATLIHQSITGLYETRIDLSQLGGDGGGGSEAAAKGGGGGTLNIEDEYRLHETSKEPDVPLGSTWLSDFPQAWAETGGMGLAVRQAPLIIPLKATSTPVSIKQYPMSQEARLGIKPHIQRLLDQGILVPCQSPWNTPLLPVKKPGTNDYRPVQDLREVNKRVEDIHPTVPNPYNLLSGLPPSHQWYTVLDLKDAFFCLRLHPTSQPLFAFEWRDPEMGISGQLTWTRLPQGFKNSPTLFDEALHRDLADFRIQHPDLILLQYVDDLLLAATSEQDCQRGTRALLQTLGNLGYRASAKKAQICQKQVKYLGYLLKEGQRWLTEARKETVMGQPTPKTPRQLREFLGTAGFCRLWIPGFAEMAAPLYPLTKTGTLFNWGPDQQKAYQEIKQALLTAPALGLPDLTKPFELFVDEKQGYAKGVLTQKLGPWRRPVAYLSKKLDPVAAGWPPCLRMVAAIAVLTKDAGKLTMGQPLVILAPHAVEALVKQPPDRWLSNARMTHYQAMLLDTDRVQFGPVVALNPATLLPLPEKEAPHDCLEILAETHGTRPDLTDQPIPDADYTWYTDGSSFLQEGQRRAGAAVTTETEVIWARALPAGTSAQRAELIALTQALKMAEGKKLNVYTDSRYAFATAHVHGEIYRRRGLLTSEGREIKNKNEILALLKALFLPKRLSIIHCPGHQKGNSAEARGNRMADQAAREAAMKAVLETSTLLAGKRTADGSEFEKRTADGSEFESPKKKAKVE

SEQ ID NO: 6906 - protein, 2096 aa, synthetic construct
MPAAKRVKLDGGDKKYSIGLDIGTNSVGWAVITDEYKVPSKKFKVLGNTDRHSIKKNLIGALLFDSGETAEATRLKRTARRRYTRRKNRICYLQEIFSNEMAKVDDSFFHRLEESFLVEEDKKHERHPIFGNIVDEVAYHEKYPTIYHLRKKLVDSTDKADLRLIYLALAHMIKFRGHFLIEGDLNPDNSDVDKLFIQLVQTYNQLFEENPINASGVDAKAILSARLSKSRRLENLIAQLPGEKKNGLFGNLIALSLGLTPNFKSNFDLAEDAKLQLSKDTYDDDLDNLLAQIGDQYADLFLAAKNLSDAILLSDILRVNTEITKAPLSASMIKRYDEHHQDLTLLKALVRQQLPEKYKEIFFDQSKNGYAGYIDGGASQEEFYKFIKPILEKMDGTEELLVKLNREDLLRKQRTFDNGSIPHQIHLGELHAILRRQEDFYPFLKDNREKIEKILTFRIPYYVGPLARGNSRFAWMTRKSEETITPWNFEEVVDKGASAQSFIERMTNFDKNLPNEKVLPKHSLLYEYFTVYNELTKVKYVTEGMRKPAFLSGEQKKAIVDLLFKTNRKVTVKQLKEDYFKKIECFDSVEISGVEDRFNASLGTYHDLLKIIKDKDFLDNEENEDILEDIVLTLTLFEDREMIEERLKTYAHLFDDKVMKQLKRRRYTGWGRLSRKLINGIRDKQSGKTILDFLKSDGFANRNFMQLIHDDSLTFKEDIQKAQVSGQGDSLHEHIANLAGSPAIKKGILQTVKVVDELVKVMGRHKPENIVIEMARENQTTQKGQKNSRERMKRIEEGIKELGSQILKEHPVENTQLQNEKLYLYYLQNGRDMYVDQELDINRLSDYDVDHIVPQSFLKDDSIDNKVLTRSDKARGKSDNVPSEEVVKKMKNYWRQLLNAKLITQRKFDNLTKAERGGLSELDKAGFIKRQLVETRQITKHVAQILDSRMNTKYDENDKLIREVKVITLKSKLVSDFRKDFQFYKVREINNYHHAHDAYLNAVVGTALIKKYPKLESEFVYGDYKVYDVRKMIAKSEQEIGKATAKYFFYSNIMNFFKTEITLANGEIRKRPLIETNGETGEIVWDKGRDFATVRKVLSMPQVNIVKKTEVQTGGFSKESILPKRNSDKLIARKKDWDPKKYGGFDSPTVAYSVLVVAKVEKGKSKKLKSVKELLGITIMERSSFEKNPIDFLEAKGYKEVKKDLIIKLPKYSLFELENGRKRMLASAGELQKGNELALPSKYVNFLYLASHYEKLKGSPEDNEQKQLFVEQHKHYLDEIIEQISEFSKRVILADANLDKVLSAYNKHRDKPIREQAENIIHLFTLTNLGAPAAFKYFDTTIDRKRYTSTKEVLDATLIHQSITGLYETRIDLSQLGGDGGGGSEAAAKGGGGGTLNIEDEYRLHETSKEPDVPLGSTWLSDFPQAWAETGGMGLAVRQAPLIIPLKATSTPVSIKQYPMSQEARLGIKPHIQRLLDQGILVPCQSPWNTPLLPVKKPGTNDYRPVQDLREVNKRVEDIHPTVPNPYNLLSGLPPSHQWYTVLDLKDAFFCLRLHPTSQPLFAFEWRDPEMGISGQLTWTRLPQGFKNSPTLFNEALHRDLADFRIQHPDLILLQYVDDLLLAATSEQDCQRGTRALLQTLGNLGYRASAKKAQICQKQVKYLGYLLKEGQRWLTEARKETVMGQPTPKTPRQLREFLGTAGFCRLWIPGFAEMAAPLYPLTKPGTLFNWGPDQQKAYQEIKQALLTAPALGLPDLTKPFELFVDEKQGYAKGVLTQKLGPWRRPVAYLSKKLDPVAAGWPPCLRMVAAIAVLTKDAGKLTMGQPLVILAPHAVEALVKQPPDRWLSNARMTHYQAMLLDTDRVQFGPVVALNPATLLPLPEKEAPHDCLEILAETHGTRPDLTDQPIPDADYTWYTDGSSFLQEGQRRAGAAVTTETEVIWARALPAGTSAQRAELIALTQALKMAEGKKLNVYTDSRYAFATAHVHGEIYRRRGWLTSEGREIKNKNEILALLKALFLPKRLSIIHCPGHQKGNSAEARGNRMADQAAREAAMKAVLETSTLLAGKRTADGSEFEKRTADGSEFESPKKKAKVE

SEQ ID NO: 6907 - protein, 2098 aa, synthetic construct
MPAAKRVKLDGGDKKYSIGLDIGTNSVGWAVITDEYKVPSKKFKVLGNTDRHSIKKNLIGALLFDSGETAEATRLKRTARRRYTRRKNRICYLQEIFSNEMAKVDDSFFHRLEESFLVEEDKKHERHPIFGNIVDEVAYHEKYPTIYHLRKKLVDSTDKADLRLIYLALAHMIKFRGHFLIEGDLNPDNSDVDKLFIQLVQTYNQLFEENPINASGVDAKAILSARLSKSRRLENLIAQLPGEKKNGLFGNLIALSLGLTPNFKSNFDLAEDAKLQLSKDTYDDDLDNLLAQIGDQYADLFLAAKNLSDAILLSDILRVNTEITKAPLSASMIKRYDEHHQDLTLLKALVRQQLPEKYKEIFFDQSKNGYAGYIDGGASQEEFYKFIKPILEKMDGTEELLVKLNREDLLRKQRTFDNGSIPHQIHLGELHAILRRQEDFYPFLKDNREKIEKILTFRIPYYVGPLARGNSRFAWMTRKSEETITPWNFEEVVDKGASAQSFIERMTNFDKNLPNEKVLPKHSLLYEYFTVYNELTKVKYVTEGMRKPAFLSGEQKKAIVDLLFKTNRKVTVKQLKEDYFKKIECFDSVEISGVEDRFNASLGTYHDLLKIIKDKDFLDNEENEDILEDIVLTLTLFEDREMIEERLKTYAHLFDDKVMKQLKRRRYTGWGRLSRKLINGIRDKQSGKTILDFLKSDGFANRNFMQLIHDDSLTFKEDIQKAQVSGQGDSLHEHIANLAGSPAIKKGILQTVKVVDELVKVMGRHKPENIVIEMARENQTTQKGQKNSRERMKRIEEGIKELGSQILKEHPVENTQLQNEKLYLYYLQNGRDMYVDQELDINRLSDYDVDHIVPQSFLKDDSIDNKVLTRSDKARGKSDNVPSEEVVKKMKNYWRQLLNAKLITQRKFDNLTKAERGGLSELDKAGFIKRQLVETRQITKHVAQILDSRMNTKYDENDKLIREVKVITLKSKLVSDFRKDFQFYKVREINNYHHAHDAYLNAVVGTALIKKYPKLESEFVYGDYKVYDVRKMIAKSEQEIGKATAKYFFYSNIMNFFKTEITLANGEIRKRPLIETNGETGEIVWDKGRDFATVRKVLSMPQVNIVKKTEVQTGGFSKESILPKRNSDKLIARKKDWDPKKYGGFDSPTVAYSVLVVAKVEKGKSKKLKSVKELLGITIMERSSFEKNPIDFLEAKGYKEVKKDLIIKLPKYSLFELENGRKRMLASAGELQKGNELALPSKYVNFLYLASHYEKLKGSPEDNEQKQLFVEQHKHYLDEIIEQISEFSKRVILADANLDKVLSAYNKHRDKPIREQAENIIHLFTLTNLGAPAAFKYFDTTIDRKRYTSTKEVLDATLIHQSITGLYETRIDLSQLGGDGGGGGGGSEAAAKGGTAPLEEEYRLFLEAPIQNVTLLEQWKREIPKVWAEINPPGLASTQAPIHVQLLSTALPVRVRQYPITLEAKRSLRETIRKFRAAGILRPVHSPWNTPLLPVRKSGTSEYRMVQDLREVNKRVETIHPTVPNPYTLLSLLPPDRIWYSVLDLKDAFFCIPLAPESQLIFAFEWADAEEGESGQLTWTRLPQGFKNSPTLFDEALNRDLQGFRLDHPSVSLLQYVDDLLIAADTQAACLSATRDLLMTLAELGYRVSGKKAQLCQEEVTYLGFKIHKGSRSLSNSRTQAILQIPVPKTKRQVREFLGTIGYCRLWIPGFAELAQPLYAATRGGNDPLVWGEKEEEAFQSLKLALTQPPALALPSLDKPFQLFVEETSGAAKGVLTQALGPWKRPVAYLSKRLDPVAAGWPRCLRAIAAAALLTREASKLTFGQDIEITSSHNLESLLRSPPDKWLTNARITQYQVLLLDPPRVRFKQTAALNPATLLPETDDTLPIHHCLDTLDSLTSTRPDLTDQPLAQAEATLFTDGSSYIRDGKRYAGAAVVTLDSVIWAEPLPIGTSAQKAELIALTKALEWSKDKSVNIYTDSRYAFATLHVHGMIYRERGLLTAGGKAIKNAPEILALLTAVWLPKRVAVMHCKGHQKDDAPTSTGNRRADEVAREVAIRPLSTQATISAGKRTADGSEFEKRTADGSEFESPKKKAKVE

SEQ ID NO: 6908 - protein, 2098 aa, synthetic construct
MPAAKRVKLDGGDKKYSIGLDIGTNSVGWAVITDEYKVPSKKFKVLGNTDRHSIKKNLIGALLFDSGETAEATRLKRTARRRYTRRKNRICYLQEIFSNEMAKVDDSFFHRLEESFLVEEDKKHERHPIFGNIVDEVAYHEKYPTIYHLRKKLVDSTDKADLRLIYLALAHMIKFRGHFLIEGDLNPDNSDVDKLFIQLVQTYNQLFEENPINASGVDAKAILSARLSKSRRLENLIAQLPGEKKNGLFGNLIALSLGLTPNFKSNFDLAEDAKLQLSKDTYDDDLDNLLAQIGDQYADLFLAAKNLSDAILLSDILRVNTEITKAPLSASMIKRYDEHHQDLTLLKALVRQQLPEKYKEIFFDQSKNGYAGYIDGGASQEEFYKFIKPILEKMDGTEELLVKLNREDLLRKQRTFDNGSIPHQIHLGELHAILRRQEDFYPFLKDNREKIEKILTFRIPYYVGPLARGNSRFAWMTRKSEETITPWNFEEVVDKGASAQSFIERMTNFDKNLPNEKVLPKHSLLYEYFTVYNELTKVKYVTEGMRKPAFLSGEQKKAIVDLLFKTNRKVTVKQLKEDYFKKIECFDSVEISGVEDRFNASLGTYHDLLKIIKDKDFLDNEENEDILEDIVLTLTLFEDREMIEERLKTYAHLFDDKVMKQLKRRRYTGWGRLSRKLINGIRDKQSGKTILDFLKSDGFANRNFMQLIHDDSLTFKEDIQKAQVSGQGDSLHEHIANLAGSPAIKKGILQTVKVVDELVKVMGRHKPENIVIEMARENQTTQKGQKNSRERMKRIEEGIKELGSQILKEHPVENTQLQNEKLYLYYLQNGRDMYVDQELDINRLSDYDVDHIVPQSFLKDDSIDNKVLTRSDKARGKSDNVPSEEVVKKMKNYWRQLLNAKLITQRKFDNLTKAERGGLSELDKAGFIKRQLVETRQITKHVAQILDSRMNTKYDENDKLIREVKVITLKSKLVSDFRKDFQFYKVREINNYHHAHDAYLNAVVGTALIKKYPKLESEFVYGDYKVYDVRKMIAKSEQEIGKATAKYFFYSNIMNFFKTEITLANGEIRKRPLIETNGETGEIVWDKGRDFATVRKVLSMPQVNIVKKTEVQTGGFSKESILPKRNSDKLIARKKDWDPKKYGGFDSPTVAYSVLVVAKVEKGKSKKLKSVKELLGITIMERSSFEKNPIDFLEAKGYKEVKKDLIIKLPKYSLFELENGRKRMLASAGELQKGNELALPSKYVNFLYLASHYEKLKGSPEDNEQKQLFVEQHKHYLDEIIEQISEFSKRVILADANLDKVLSAYNKHRDKPIREQAENIIHLFTLTNLGAPAAFKYFDTTIDRKRYTSTKEVLDATLIHQSITGLYETRIDLSQLGGDGGGGGGGSEAAAKGGTAPLEEEYRLFLEAPIQNVTLLEQWKREIPKVWAEINPPGLASTQAPIHVQLLSTALPVRVRQYPITLEAKRSLRETIRKFRAAGILRPVHSPWNTPLLPVRKSGTSEYRMVQDLREVNKRVETIHPTVPNPYTLLSLLPPDRIWYSVLDLKDAFFCIPLAPESQLIFAFEWADAEEGESGQLTWTRLPQGFKNSPTLFNEALNRDLQGFRLDHPSVSLLQYVDDLLIAADTQAACLSATRDLLMTLAELGYRVSGKKAQLCQEEVTYLGFKIHKGSRSLSNSRTQAILQIPVPKTKRQVREFLGTIGYCRLWIPGFAELAQPLYAATRPGNDPLVWGEKEEEAFQSLKLALTQPPALALPSLDKPFQLFVEETSGAAKGVLTQALGPWKRPVAYLSKRLDPVAAGWPRCLRAIAAAALLTREASKLTFGQDIEITSSHNLESLLRSPPDKWLTNARITQYQVLLLDPPRVRFKQTAALNPATLLPETDDTLPIHHCLDTLDSLTSTRPDLTDQPLAQAEATLFTDGSSYIRDGKRYAGAAVVTLDSVIWAEPLPIGTSAQKAELIALTKALEWSKDKSVNIYTDSRYAFATLHVHGMIYRERGWLTAGGKAIKNAPEILALLTAVWLPKRVAVMHCKGHQKDDAPTSTGNRRADEVAREVAIRPLSTQATISAGKRTADGSEFEKRTADGSEFESPKKKAKVE

SEQ ID NO: 6909 - protein, 2102 aa, synthetic construct
MPAAKRVKLDGGDKKYSIGLDIGTNSVGWAVITDEYKVPSKKFKVLGNTDRHSIKKNLIGALLFDSGETAEATRLKRTARRRYTRRKNRICYLQEIFSNEMAKVDDSFFHRLEESFLVEEDKKHERHPIFGNIVDEVAYHEKYPTIYHLRKKLVDSTDKADLRLIYLALAHMIKFRGHFLIEGDLNPDNSDVDKLFIQLVQTYNQLFEENPINASGVDAKAILSARLSKSRRLENLIAQLPGEKKNGLFGNLIALSLGLTPNFKSNFDLAEDAKLQLSKDTYDDDLDNLLAQIGDQYADLFLAAKNLSDAILLSDILRVNTEITKAPLSASMIKRYDEHHQDLTLLKALVRQQLPEKYKEIFFDQSKNGYAGYIDGGASQEEFYKFIKPILEKMDGTEELLVKLNREDLLRKQRTFDNGSIPHQIHLGELHAILRRQEDFYPFLKDNREKIEKILTFRIPYYVGPLARGNSRFAWMTRKSEETITPWNFEEVVDKGASAQSFIERMTNFDKNLPNEKVLPKHSLLYEYFTVYNELTKVKYVTEGMRKPAFLSGEQKKAIVDLLFKTNRKVTVKQLKEDYFKKIECFDSVEISGVEDRFNASLGTYHDLLKIIKDKDFLDNEENEDILEDIVLTLTLFEDREMIEERLKTYAHLFDDKVMKQLKRRRYTGWGRLSRKLINGIRDKQSGKTILDFLKSDGFANRNFMQLIHDDSLTFKEDIQKAQVSGQGDSLHEHIANLAGSPAIKKGILQTVKVVDELVKVMGRHKPENIVIEMARENQTTQKGQKNSRERMKRIEEGIKELGSQILKEHPVENTQLQNEKLYLYYLQNGRDMYVDQELDINRLSDYDVDHIVPQSFLKDDSIDNKVLTRSDKARGKSDNVPSEEVVKKMKNYWRQLLNAKLITQRKFDNLTKAERGGLSELDKAGFIKRQLVETRQITKHVAQILDSRMNTKYDENDKLIREVKVITLKSKLVSDFRKDFQFYKVREINNYHHAHDAYLNAVVGTALIKKYPKLESEFVYGDYKVYDVRKMIAKSEQEIGKATAKYFFYSNIMNFFKTEITLANGEIRKRPLIETNGETGEIVWDKGRDFATVRKVLSMPQVNIVKKTEVQTGGFSKESILPKRNSDKLIARKKDWDPKKYGGFDSPTVAYSVLVVAKVEKGKSKKLKSVKELLGITIMERSSFEKNPIDFLEAKGYKEVKKDLIIKLPKYSLFELENGRKRMLASAGELQKGNELALPSKYVNFLYLASHYEKLKGSPEDNEQKQLFVEQHKHYLDEIIEQISEFSKRVILADANLDKVLSAYNKHRDKPIREQAENIIHLFTLTNLGAPAAFKYFDTTIDRKRYTSTKEVLDATLIHQSITGLYETRIDLSQLGGDGGGGGGGSEAAAKGGTVSLQDEHRLFDIPVTTSLPDVWLQDFPQAWAETGGLGRAKCQAPIIIDLKPTAVPVSIKQYPMSLEAHMGIRQHIIKFLELGVLRPCRSPWNTPLLPVKKPGTQDYRPVQDLREINKRTVDIHPTVPNPYNLLSTLKPDYSWYTVLDLKDAFFCLPLAPQSQELFAFEWKDPERGISGQLTWTRLPQGFKNSPTLFNEALHRDLTDFRTQHPEVTLLQYVDDLLLAAPTKKACTQGTRHLLQELGEKGYRASAKKAQICQTKVTYLGYILSEGKRWLTPGRIETVARIPPPRNPREVREFLGTAGFCRLWIPGFAELAAPLYALTKPSTPFTWQTEHQLAFEALKKALLSAPALGLPDTSKPFTLFLDERQGIAKGVLTQKLGPWKRPVAYLSKKLDPVAAGWPPCLRIMAATAMLVKDSAKLTLGQPLTVITPHTLEAIVRQPPDRWITNARLTHYQALLLDTDRVQFGPPVTLNPATLLPVPENQPSPHDCRQVLAETHGTREDLKDQELPDADHTWYTDGSSYLDSGTRRAGAAVVDGHNTIWAQSLPPGTSAQKAELIALTKALELSKGKKANIYTDSRYAFATAHTHGSIYERRGWLTSEGKEIKNKAEIIALLKALFLPQEVAIIHCPGHQKGQDPVAVGNRQADRVARQAAMAEVLTLATEPDNTSHITAGKRTADGSEFEKRTADGSEFESPKKKAKVE

SEQ ID NO: 6910 - protein, 2173 aa, synthetic construct
MPAAKRVKLDGGDKKYSIGLDIGTNSVGWAVITDEYKVPSKKFKVLGNTDRHSIKKNLIGALLFDSGETAEATRLKRTARRRYTRRKNRICYLQEIFSNEMAKVDDSFFHRLEESFLVEEDKKHERHPIFGNIVDEVAYHEKYPTIYHLRKKLVDSTDKADLRLIYLALAHMIKFRGHFLIEGDLNPDNSDVDKLFIQLVQTYNQLFEENPINASGVDAKAILSARLSKSRRLENLIAQLPGEKKNGLFGNLIALSLGLTPNFKSNFDLAEDAKLQLSKDTYDDDLDNLLAQIGDQYADLFLAAKNLSDAILLSDILRVNTEITKAPLSASMIKRYDEHHQDLTLLKALVRQQLPEKYKEIFFDQSKNGYAGYIDGGASQEEFYKFIKPILEKMDGTEELLVKLNREDLLRKQRTFDNGSIPHQIHLGELHAILRRQEDFYPFLKDNREKIEKILTFRIPYYVGPLARGNSRFAWMTRKSEETITPWNFEEVVDKGASAQSFIERMTNFDKNLPNEKVLPKHSLLYEYFTVYNELTKVKYVTEGMRKPAFLSGEQKKAIVDLLFKTNRKVTVKQLKEDYFKKIECFDSVEISGVEDRFNASLGTYHDLLKIIKDKDFLDNEENEDILEDIVLTLTLFEDREMIEERLKTYAHLFDDKVMKQLKRRRYTGWGRLSRKLINGIRDKQSGKTILDFLKSDGFANRNFMQLIHDDSLTFKEDIQKAQVSGQGDSLHEHIANLAGSPAIKKGILQTVKVVDELVKVMGRHKPENIVIEMARENQTTQKGQKNSRERMKRIEEGIKELGSQILKEHPVENTQLQNEKLYLYYLQNGRDMYVDQELDINRLSDYDVDHIVPQSFLKDDSIDNKVLTRSDKARGKSDNVPSEEVVKKMKNYWRQLLNAKLITQRKFDNLTKAERGGLSELDKAGFIKRQLVETRQITKHVAQILDSRMNTKYDENDKLIREVKVITLKSKLVSDFRKDFQFYKVREINNYHHAHDAYLNAVVGTALIKKYPKLESEFVYGDYKVYDVRKMIAKSEQEIGKATAKYFFYSNIMNFFKTEITLANGEIRKRPLIETNGETGEIVWDKGRDFATVRKVLSMPQVNIVKKTEVQTGGFSKESILPKRNSDKLIARKKDWDPKKYGGFDSPTVAYSVLVVAKVEKGKSKKLKSVKELLGITIMERSSFEKNPIDFLEAKGYKEVKKDLIIKLPKYSLFELENGRKRMLASAGELQKGNELALPSKYVNFLYLASHYEKLKGSPEDNEQKQLFVEQHKHYLDEIIEQISEFSKRVILADANLDKVLSAYNKHRDKPIREQAENIIHLFTLTNLGAPAAFKYFDTTIDRKRYTSTKEVLDATLIHQSITGLYETRIDLSQLGGDGGGGGGGSEAAAKGGMDLLKPLTVERKGVKIKGYWNSQADITCVPKDLLQGEEPVRQQNVTTIHGTQEGDVYYVNLKIDGRRINTEVIGTTLDYAIITPGDVPWILKKPLELTIKLDLEEQQGTLLNNSILSKKGKEELKQLFEKYSALWQSWENQVGHRRIRPHKIATGTVKPTPQKQYHINPKAKPDIQIVINDLLKQGVLIQKESTMNTPVYPVPKPNGRWRMVLDYRAVNKVTPLIAVQNQHSYGILGSLFKGRYKTTIDLSNGFWAHPIVPEDYWITAFTWQGKQYCWTVLPQGFLNSPGLFTGDVVDLLQGIPNVEVYVDDVYISHDSEKEHLEYLDILFNRLKEAGYIISLKKSNIANSIVDFLGFQITNEGRGLTDTFKEKLENITAPTTLKQLQSILGLLNFARNFIPDFTELIAPLYALIPKSTKNYVPWQIEHSTTLETLITKLNGAEYLQGRKGDKTLIMKVNASYTTGYIRYYNEGEKKPISYVSIVFSKTELKFTELEKLLTTVHKGLLKALDLSMGQNIHVYSPIVSMQNIQKTPQTAKKALASRWLSWLSYLEDPRIRFFYDPQMPALKDLPAVDTGKDNKKHPSNFQHIFYTDGSAITSPTKEGHLNAGMGIVYFINKDGNLQKQQEWSISLGNHTAQFAEIAAFEFALKKCLPLGGNILVVTDSNYVAKAYNEELDVWASNGFVNNRKKPLKHISKWKSVADLKRLRPDVVVTHEPGHQKLDSSPHAYGNNLADQLATQASFKVHAGKRTADGSEFEKRTADGSEFESPKKKAKVE

SEQ ID NO: 6911 - protein, 2095 aa, synthetic construct
MPAAKRVKLDGGDKKYSIGLDIGTNSVGWAVITDEYKVPSKKFKVLGNTDRHSIKKNLIGALLFDSGETAEATRLKRTARRRYTRRKNRICYLQEIFSNEMAKVDDSFFHRLEESFLVEEDKKHERHPIFGNIVDEVAYHEKYPTIYHLRKKLVDSTDKADLRLIYLALAHMIKFRGHFLIEGDLNPDNSDVDKLFIQLVQTYNQLFEENPINASGVDAKAILSARLSKSRRLENLIAQLPGEKKNGLFGNLIALSLGLTPNFKSNFDLAEDAKLQLSKDTYDDDLDNLLAQIGDQYADLFLAAKNLSDAILLSDILRVNTEITKAPLSASMIKRYDEHHQDLTLLKALVRQQLPEKYKEIFFDQSKNGYAGYIDGGASQEEFYKFIKPILEKMDGTEELLVKLNREDLLRKQRTFDNGSIPHQIHLGELHAILRRQEDFYPFLKDNREKIEKILTFRIPYYVGPLARGNSRFAWMTRKSEETITPWNFEEVVDKGASAQSFIERMTNFDKNLPNEKVLPKHSLLYEYFTVYNELTKVKYVTEGMRKPAFLSGEQKKAIVDLLFKTNRKVTVKQLKEDYFKKIECFDSVEISGVEDRFNASLGTYHDLLKIIKDKDFLDNEENEDILEDIVLTLTLFEDREMIEERLKTYAHLFDDKVMKQLKRRRYTGWGRLSRKLINGIRDKQSGKTILDFLKSDGFANRNFMQLIHDDSLTFKEDIQKAQVSGQGDSLHEHIANLAGSPAIKKGILQTVKVVDELVKVMGRHKPENIVIEMARENQTTQKGQKNSRERMKRIEEGIKELGSQILKEHPVENTQLQNEKLYLYYLQNGRDMYVDQELDINRLSDYDVDHIVPQSFLKDDSIDNKVLTRSDKARGKSDNVPSEEVVKKMKNYWRQLLNAKLITQRKFDNLTKAERGGLSELDKAGFIKRQLVETRQITKHVAQILDSRMNTKYDENDKLIREVKVITLKSKLVSDFRKDFQFYKVREINNYHHAHDAYLNAVVGTALIKKYPKLESEFVYGDYKVYDVRKMIAKSEQEIGKATAKYFFYSNIMNFFKTEITLANGEIRKRPLIETNGETGEIVWDKGRDFATVRKVLSMPQVNIVKKTEVQTGGFSKESILPKRNSDKLIARKKDWDPKKYGGFDSPTVAYSVLVVAKVEKGKSKKLKSVKELLGITIMERSSFEKNPIDFLEAKGYKEVKKDLIIKLPKYSLFELENGRKRMLASAGELQKGNELALPSKYVNFLYLASHYEKLKGSPEDNEQKQLFVEQHKHYLDEIIEQISEFSKRVILADANLDKVLSAYNKHRDKPIREQAENIIHLFTLTNLGAPAAFKYFDTTIDRKRYTSTKEVLDATLIHQSITGLYETRIDLSQLGGDGGGGGGGSEAAAKGGTLQLEEEYRLFEPESTQKQEMDIWLKNFPQAWAETGGMGTAHCQAPVLIQLKATATPISIRQYPMPHEAYQGIKPHIRRMLDQGILKPCQSPWNTPLLPVKKPGTEDYRPVQDLREVNKRVEDIHPTVPNPYNLLSTLPPSHPWYTVLDLKDAFFCLRLHSESQLLFAFEWRDPEIGLSGQLTWTRLPQGFKNSPTLFNEALHSDLADFRVRYPALVLLQYVDDLLLAAATRTECLEGTKALLETLGNKGYRASAKKAQICLQEVTYLGYSLKDGQRWLTKARKEAILSIPVPKNSRQVREFLGKAGYCRLFIPGFAELAAPLYPLTRPGTLFQWGTEQQLAFEDIKKALLSSPALGLPDITKPFELFIDENSGFAKGVLVQKLGPWKRPVAYLSKKLDTVASGWPPCLRMVAAIAILVKDAGKLTLGQPLTILTSHPVEALVRQPPNKWLSNARMTHYQAMLLDAERVHFGPTVSLNPATLLPLPSGGNHHDCLQILAETHGTRPDLTDQPLPDADLTWYTDGSSFIRNGEREAGAAVTTESEVIWAAPLPPGTSAQRAELIALTQALKMAEGKKLTVYTDSRYAFATTHVHGEIYRRRGWLTSEGKEIKNKNEILALLEALFLPKRLSIIHCPGHQKGDSPQAKGNRLADDTAKKAATETHSSLTVLPAGKRTADGSEFEKRTADGSEFESPKKKAKVE

SEQ ID NO: 6912 - protein, 2176 aa, synthetic construct
MPAAKRVKLDGGDKKYSIGLDIGTNSVGWAVITDEYKVPSKKFKVLGNTDRHSIKKNLIGALLFDSGETAEATRLKRTARRRYTRRKNRICYLQEIFSNEMAKVDDSFFHRLEESFLVEEDKKHERHPIFGNIVDEVAYHEKYPTIYHLRKKLVDSTDKADLRLIYLALAHMIKFRGHFLIEGDLNPDNSDVDKLFIQLVQTYNQLFEENPINASGVDAKAILSARLSKSRRLENLIAQLPGEKKNGLFGNLIALSLGLTPNFKSNFDLAEDAKLQLSKDTYDDDLDNLLAQIGDQYADLFLAAKNLSDAILLSDILRVNTEITKAPLSASMIKRYDEHHQDLTLLKALVRQQLPEKYKEIFFDQSKNGYAGYIDGGASQEEFYKFIKPILEKMDGTEELLVKLNREDLLRKQRTFDNGSIPHQIHLGELHAILRRQEDFYPFLKDNREKIEKILTFRIPYYVGPLARGNSRFAWMTRKSEETITPWNFEEVVDKGASAQSFIERMTNFDKNLPNEKVLPKHSLLYEYFTVYNELTKVKYVTEGMRKPAFLSGEQKKAIVDLLFKTNRKVTVKQLKEDYFKKIECFDSVEISGVEDRFNASLGTYHDLLKIIKDKDFLDNEENEDILEDIVLTLTLFEDREMIEERLKTYAHLFDDKVMKQLKRRRYTGWGRLSRKLINGIRDKQSGKTILDFLKSDGFANRNFMQLIHDDSLTFKEDIQKAQVSGQGDSLHEHIANLAGSPAIKKGILQTVKVVDELVKVMGRHKPENIVIEMARENQTTQKGQKNSRERMKRIEEGIKELGSQILKEHPVENTQLQNEKLYLYYLQNGRDMYVDQELDINRLSDYDVDHIVPQSFLKDDSIDNKVLTRSDKARGKSDNVPSEEVVKKMKNYWRQLLNAKLITQRKFDNLTKAERGGLSELDKAGFIKRQLVETRQITKHVAQILDSRMNTKYDENDKLIREVKVITLKSKLVSDFRKDFQFYKVREINNYHHAHDAYLNAVVGTALIKKYPKLESEFVYGDYKVYDVRKMIAKSEQEIGKATAKYFFYSNIMNFFKTEITLANGEIRKRPLIETNGETGEIVWDKGRDFATVRKVLSMPQVNIVKKTEVQTGGFSKESILPKRNSDKLIARKKDWDPKKYGGFDSPTVAYSVLVVAKVEKGKSKKLKSVKELLGITIMERSSFEKNPIDFLEAKGYKEVKKDLIIKLPKYSLFELENGRKRMLASAGELQKGNELALPSKYVNFLYLASHYEKLKGSPEDNEQKQLFVEQHKHYLDEIIEQISEFSKRVILADANLDKVLSAYNKHRDKPIREQAENIIHLFTLTNLGAPAAFKYFDTTIDRKRYTSTKEVLDATLIHQSITGLYETRIDLSQLGGDGGGGGGGSEAAAKGGMNPLQLLQPLPAEIKGTKLLAHWNSGATITCIPESFLEDEQPIKKTLIKTIHGEKQQNVYYVTFKVKGRKVEAEVIASPYEYILLSPTDVPWLTQQPLQLTILVPLQEYQEKILSKTALPEDQKQQLKTLFVKYDNLWQHWENQVGHRKIRPHNIATGDYPPRPQKQYPINPKAKPSIQIVIDDLLKQGVLTPQNSTMNTPVYPVPKPDGRWRMVLDYREVNKTIPLTAAQNQHSAGILATIVRQKYKTTLDLANGFWAHPITPESYWLTAFTWQGKQYCWTRLPQGFLNSPALFTADVVDLLKEIPNVQVYVDDIYLSHDDPKEHVQQLEKVFQILLQAGYVVSLKKSEIGQKTVEFLGFNITKEGRGLTDTFKTKLLNITPPKDLKQLQSILGLLNFARNFIPNFAELVQPLYNLIASAKGKYIEWSEENTKQLNMVIEALNTASNLEERLPEQRLVIKVNTSPSAGYVRYYNETGKKPIMYLNYVFSKAELKFSMLEKLLTTMHKALIKAMDLAMGQEILVYSPIVSMTKIQKTPLPERKALPIRWITWMTYLEDPRIQFHYDKTLPELKHIPDVYTSSQSPVKHPSQYEGVFYTDGSAIKSPDPTKSNNAGMGIVHATYKPEYQVLNQWSIPLGNHTAQMAEIAAVEFACKKALKIPGPVLVITDSFYVAESANKELPYWKSNGFVNNKKKPLKHISKWKSIAECLSMKPDITIQHEKGISLQIPVFILKGNALADKLATQGSYVVNAGKRTADGSEFEKRTADGSEFESPKKKAKVE

SEQ ID NO: 6913 - protein, 2176 aa, synthetic construct
MPAAKRVKLDGGDKKYSIGLDIGTNSVGWAVITDEYKVPSKKFKVLGNTDRHSIKKNLIGALLFDSGETAEATRLKRTARRRYTRRKNRICYLQEIFSNEMAKVDDSFFHRLEESFLVEEDKKHERHPIFGNIVDEVAYHEKYPTIYHLRKKLVDSTDKADLRLIYLALAHMIKFRGHFLIEGDLNPDNSDVDKLFIQLVQTYNQLFEENPINASGVDAKAILSARLSKSRRLENLIAQLPGEKKNGLFGNLIALSLGLTPNFKSNFDLAEDAKLQLSKDTYDDDLDNLLAQIGDQYADLFLAAKNLSDAILLSDILRVNTEITKAPLSASMIKRYDEHHQDLTLLKALVRQQLPEKYKEIFFDQSKNGYAGYIDGGASQEEFYKFIKPILEKMDGTEELLVKLNREDLLRKQRTFDNGSIPHQIHLGELHAILRRQEDFYPFLKDNREKIEKILTFRIPYYVGPLARGNSRFAWMTRKSEETITPWNFEEVVDKGASAQSFIERMTNFDKNLPNEKVLPKHSLLYEYFTVYNELTKVKYVTEGMRKPAFLSGEQKKAIVDLLFKTNRKVTVKQLKEDYFKKIECFDSVEISGVEDRFNASLGTYHDLLKIIKDKDFLDNEENEDILEDIVLTLTLFEDREMIEERLKTYAHLFDDKVMKQLKRRRYTGWGRLSRKLINGIRDKQSGKTILDFLKSDGFANRNFMQLIHDDSLTFKEDIQKAQVSGQGDSLHEHIANLAGSPAIKKGILQTVKVVDELVKVMGRHKPENIVIEMARENQTTQKGQKNSRERMKRIEEGIKELGSQILKEHPVENTQLQNEKLYLYYLQNGRDMYVDQELDINRLSDYDVDHIVPQSFLKDDSIDNKVLTRSDKARGKSDNVPSEEVVKKMKNYWRQLLNAKLITQRKFDNLTKAERGGLSELDKAGFIKRQLVETRQITKHVAQILDSRMNTKYDENDKLIREVKVITLKSKLVSDFRKDFQFYKVREINNYHHAHDAYLNAVVGTALIKKYPKLESEFVYGDYKVYDVRKMIAKSEQEIGKATAKYFFYSNIMNFFKTEITLANGEIRKRPLIETNGETGEIVWDKGRDFATVRKVLSMPQVNIVKKTEVQTGGFSKESILPKRNSDKLIARKKDWDPKKYGGFDSPTVAYSVLVVAKVEKGKSKKLKSVKELLGITIMERSSFEKNPIDFLEAKGYKEVKKDLIIKLPKYSLFELENGRKRMLASAGELQKGNELALPSKYVNFLYLASHYEKLKGSPEDNEQKQLFVEQHKHYLDEIIEQISEFSKRVILADANLDKVLSAYNKHRDKPIREQAENIIHLFTLTNLGAPAAFKYFDTTIDRKRYTSTKEVLDATLIHQSITGLYETRIDLSQLGGDGGGGGGGSEAAAKGGMNPLQLLQPLPAEIKGTKLLAHWNSGATITCIPESFLEDEQPIKKTLIKTIHGEKQQNVYYVTFKVKGRKVEAEVIASPYEYILLSPTDVPWLTQQPLQLTILVPLQEYQEKILSKTALPEDQKQQLKTLFVKYDNLWQHWENQVGHRKIRPHNIATGDYPPRPQKQYPINPKAKPSIQIVIDDLLKQGVLTPQNSTMNTPVYPVPKPDGRWRMVLDYREVNKTIPLTAAQNQHSAGILATIVRQKYKTTLDLANGFWAHPITPESYWLTAFTWQGKQYCWTRLPQGFLNSPALFNADVVDLLKEIPNVQVYVDDIYLSHDDPKEHVQQLEKVFQILLQAGYVVSLKKSEIGQKTVEFLGFNITKEGRGLTDTFKTKLLNITPPKDLKQLQSILGKLNFARNFIPNFAELVQPLYNLIAPAKGKYIEWSEENTKQLNMVIEALNTASNLEERLPEQRLVIKVNTSPSAGYVRYYNETGKKPIMYLNYVFSKAELKFSMLEKLLTTMHKALIKAMDLAMGQEILVYSPIVSMTKIQKTPLPERKALPIRWITWMTYLEDPRIQFHYDKTLPELKHIPDVYTSSQSPVKHPSQYEGVFYTDGSAIKSPDPTKSNNAGMGIVHATYKPEYQVLNQWSIPLGNHTAQMAEIAAVEFACKKALKIPGPVLVITDSFYVAESANKELPYWKSNGFVNNKKKPLKHISKWKSIAECLSMKPDITIQHEKGISLQIPVFILKGNALADKLATQGSYVVNAGKRTADGSEFEKRTADGSEFESPKKKAKVE

SEQ ID NO: 6914 - protein, 2218 aa, synthetic construct
MPAAKRVKLDGGDKKYSIGLDIGTNSVGWAVITDEYKVPSKKFKVLGNTDRHSIKKNLIGALLFDSGETAEATRLKRTARRRYTRRKNRICYLQEIFSNEMAKVDDSFFHRLEESFLVEEDKKHERHPIFGNIVDEVAYHEKYPTIYHLRKKLVDSTDKADLRLIYLALAHMIKFRGHFLIEGDLNPDNSDVDKLFIQLVQTYNQLFEENPINASGVDAKAILSARLSKSRRLENLIAQLPGEKKNGLFGNLIALSLGLTPNFKSNFDLAEDAKLQLSKDTYDDDLDNLLAQIGDQYADLFLAAKNLSDAILLSDILRVNTEITKAPLSASMIKRYDEHHQDLTLLKALVRQQLPEKYKEIFFDQSKNGYAGYIDGGASQEEFYKFIKPILEKMDGTEELLVKLNREDLLRKQRTFDNGSIPHQIHLGELHAILRRQEDFYPFLKDNREKIEKILTFRIPYYVGPLARGNSRFAWMTRKSEETITPWNFEEVVDKGASAQSFIERMTNFDKNLPNEKVLPKHSLLYEYFTVYNELTKVKYVTEGMRKPAFLSGEQKKAIVDLLFKTNRKVTVKQLKEDYFKKIECFDSVEISGVEDRFNASLGTYHDLLKIIKDKDFLDNEENEDILEDIVLTLTLFEDREMIEERLKTYAHLFDDKVMKQLKRRRYTGWGRLSRKLINGIRDKQSGKTILDFLKSDGFANRNFMQLIHDDSLTFKEDIQKAQVSGQGDSLHEHIANLAGSPAIKKGILQTVKVVDELVKVMGRHKPENIVIEMARENQTTQKGQKNSRERMKRIEEGIKELGSQILKEHPVENTQLQNEKLYLYYLQNGRDMYVDQELDINRLSDYDVDHIVPQSFLKDDSIDNKVLTRSDKARGKSDNVPSEEVVKKMKNYWRQLLNAKLITQRKFDNLTKAERGGLSELDKAGFIKRQLVETRQITKHVAQILDSRMNTKYDENDKLIREVKVITLKSKLVSDFRKDFQFYKVREINNYHHAHDAYLNAVVGTALIKKYPKLESEFVYGDYKVYDVRKMIAKSEQEIGKATAKYFFYSNIMNFFKTEITLANGEIRKRPLIETNGETGEIVWDKGRDFATVRKVLSMPQVNIVKKTEVQTGGFSKESILPKRNSDKLIARKKDWDPKKYGGFDSPTVAYSVLVVAKVEKGKSKKLKSVKELLGITIMERSSFEKNPIDFLEAKGYKEVKKDLIIKLPKYSLFELENGRKRMLASAGELQKGNELALPSKYVNFLYLASHYEKLKGSPEDNEQKQLFVEQHKHYLDEIIEQISEFSKRVILADANLDKVLSAYNKHRDKPIREQAENIIHLFTLTNLGAPAAFKYFDTTIDRKRYTSTKEVLDATLIHQSITGLYETRIDLSQLGGDGGGGGGGSEAAAKGGTLGDQGSRGSDPLPEPRVTLTVEGIPTEFLVNTGAEHSVLTKPMGKMGSKRTVVAGATGSKVYPWTTKRLLKIGQKQVTHSFLVIPECPAPLLGRDLLTKLKAQIQFSTEGPQVTWEDRPAMCLVLNLEEEYRLHEKPVPPSIDPSWLQLFPMVWAEKAGMGLANQVPPVVVELKSDASPVAVRQYPMSKEAREGIRPHIQRFLDLGILVPCQSPWNTPLLPVKKPGTNDYRPVQDLREVNKRVQDIHPTVPNPYNLLSSLPPSHTWYSVLDLKDAFFCLKLHPNSQPLFAFEWRDPEKGNTGQLTWTRLPQGFKNSPTLFDEALHRDLASFRALNPQVVMLQYVDDLLVAAPTYRDCKEGTRRLLQELSKLGYRVSAKKAQLCREEVTYLGYLLKGGKRWLTPARKATVMKIPTPTTPRQVREFLGTAGFCRLWIPGFASLAAPLYPLTREKVPFTWTEAHQEAFGRIKEALLSAPALALPDLTKPFALYVDEKEGVARGVLTQTLGPWRRPVAYLSKKLDPVASGWPTCLKAIAAVALLLKDADKLTLGQNVLVIAPHNLESIVRQPPDRWMTNARMTHYQSLLLNERVSFAPPAILNPATLLPVESDDTPIHICSEILAEETGTRPDLRDQPLPGVPAWYTDGSSFIMDGRRQAGAAIVDNKRTVWASNLPEGTSAQKAELIALTQALRLAEGKSINIYTDSRYAFATAHVHGAIYKQRGLLTSAGKDIKNKEEILALLEAIHLPKRVAIIHCPGHQRGTDPVATGNRKADEAAKQAAQSTRILTETTKNAGKRTADGSEFEKRTADGSEFESPKKKAKVE

SEQ ID NO: 6915 - protein, 2127 aa, synthetic construct
MPAAKRVKLDGGDKKYSIGLDIGTNSVGWAVITDEYKVPSKKFKVLGNTDRHSIKKNLIGALLFDSGETAEATRLKRTARRRYTRRKNRICYLQEIFSNEMAKVDDSFFHRLEESFLVEEDKKHERHPIFGNIVDEVAYHEKYPTIYHLRKKLVDSTDKADLRLIYLALAHMIKFRGHFLIEGDLNPDNSDVDKLFIQLVQTYNQLFEENPINASGVDAKAILSARLSKSRRLENLIAQLPGEKKNGLFGNLIALSLGLTPNFKSNFDLAEDAKLQLSKDTYDDDLDNLLAQIGDQYADLFLAAKNLSDAILLSDILRVNTEITKAPLSASMIKRYDEHHQDLTLLKALVRQQLPEKYKEIFFDQSKNGYAGYIDGGASQEEFYKFIKPILEKMDGTEELLVKLNREDLLRKQRTFDNGSIPHQIHLGELHAILRRQEDFYPFLKDNREKIEKILTFRIPYYVGPLARGNSRFAWMTRKSEETITPWNFEEVVDKGASAQSFIERMTNFDKNLPNEKVLPKHSLLYEYFTVYNELTKVKYVTEGMRKPAFLSGEQKKAIVDLLFKTNRKVTVKQLKEDYFKKIECFDSVEISGVEDRFNASLGTYHDLLKIIKDKDFLDNEENEDILEDIVLTLTLFEDREMIEERLKTYAHLFDDKVMKQLKRRRYTGWGRLSRKLINGIRDKQSGKTILDFLKSDGFANRNFMQLIHDDSLTFKEDIQKAQVSGQGDSLHEHIANLAGSPAIKKGILQTVKVVDELVKVMGRHKPENIVIEMARENQTTQKGQKNSRERMKRIEEGIKELGSQILKEHPVENTQLQNEKLYLYYLQNGRDMYVDQELDINRLSDYDVDHIVPQSFLKDDSIDNKVLTRSDKARGKSDNVPSEEVVKKMKNYWRQLLNAKLITQRKFDNLTKAERGGLSELDKAGFIKRQLVETRQITKHVAQILDSRMNTKYDENDKLIREVKVITLKSKLVSDFRKDFQFYKVREINNYHHAHDAYLNAVVGTALIKKYPKLESEFVYGDYKVYDVRKMIAKSEQEIGKATAKYFFYSNIMNFFKTEITLANGEIRKRPLIETNGETGEIVWDKGRDFATVRKVLSMPQVNIVKKTEVQTGGFSKESILPKRNSDKLIARKKDWDPKKYGGFDSPTVAYSVLVVAKVEKGKSKKLKSVKELLGITIMERSSFEKNPIDFLEAKGYKEVKKDLIIKLPKYSLFELENGRKRMLASAGELQKGNELALPSKYVNFLYLASHYEKLKGSPEDNEQKQLFVEQHKHYLDEIIEQISEFSKRVILADANLDKVLSAYNKHRDKPIREQAENIIHLFTLTNLGAPAAFKYFDTTIDRKRYTSTKEVLDATLIHQSITGLYETRIDLSQLGGDGGGGGGGSEAAAKGGLLGRDLLTKLKAQIQFSTEGPQVTWEDRPAMCLVLNLEEEYRLHEKPVPPSIDPSWLQLFPMVWAEKAGMGLANQVPPVVVELKSDASPVAVRQYPMSKEAREGIRPHIQRFLDLGILVPCQSPWNTPLLPVKKPGTNDYRPVQDLREVNKRVQDIHPTVPNPYNLLSSLPPSHTWYSVLDLKDAFFCLKLHPNSQPLFAFEWRDPEKGNTGQLTWTRLPQGFKNSPTLFNEALHRDLASFRALNPQVVMLQYVDDLLVAAPTYRDCKEGTRRLLQELSKLGYRVSAKKAQLCREEVTYLGYLLKGGKRWLTPARKATVMKIPTPTTPRQVREFLGTAGFCRLWIPGFASLAAPLYPLTRPKVPFTWTEAHQEAFGRIKEALLSAPALALPDLTKPFALYVDEKEGVARGVLTQTLGPWRRPVAYLSKKLDPVASGWPTCLKAIAAVALLLKDADKLTLGQNVLVIAPHNLESIVRQPPDRWMTNARMTHYQSLLLNERVSFAPPAILNPATLLPVESDDTPIHICSEILAEETGTRPDLRDQPLPGVPAWYTDGSSFIMDGRRQAGAAIVDNKRTVWASNLPEGTSAQKAELIALTQALRLAEGKSINIYTDSRYAFATAHVHGAIYKQRGWLTSAGKDIKNKEEILALLEAIHLPKRVAIIHCPGHQRGTDPVATGNRKADEAAKQAAQSTRILTETTKNAGKRTADGSEFEKRTADGSEFESPKKKAKVE

SEQ ID NO: 6916 - protein, 2218 aa, synthetic construct
MPAAKRVKLDGGDKKYSIGLDIGTNSVGWAVITDEYKVPSKKFKVLGNTDRHSIKKNLIGALLFDSGETAEATRLKRTARRRYTRRKNRICYLQEIFSNEMAKVDDSFFHRLEESFLVEEDKKHERHPIFGNIVDEVAYHEKYPTIYHLRKKLVDSTDKADLRLIYLALAHMIKFRGHFLIEGDLNPDNSDVDKLFIQLVQTYNQLFEENPINASGVDAKAILSARLSKSRRLENLIAQLPGEKKNGLFGNLIALSLGLTPNFKSNFDLAEDAKLQLSKDTYDDDLDNLLAQIGDQYADLFLAAKNLSDAILLSDILRVNTEITKAPLSASMIKRYDEHHQDLTLLKALVRQQLPEKYKEIFFDQSKNGYAGYIDGGASQEEFYKFIKPILEKMDGTEELLVKLNREDLLRKQRTFDNGSIPHQIHLGELHAILRRQEDFYPFLKDNREKIEKILTFRIPYYVGPLARGNSRFAWMTRKSEETITPWNFEEVVDKGASAQSFIERMTNFDKNLPNEKVLPKHSLLYEYFTVYNELTKVKYVTEGMRKPAFLSGEQKKAIVDLLFKTNRKVTVKQLKEDYFKKIECFDSVEISGVEDRFNASLGTYHDLLKIIKDKDFLDNEENEDILEDIVLTLTLFEDREMIEERLKTYAHLFDDKVMKQLKRRRYTGWGRLSRKLINGIRDKQSGKTILDFLKSDGFANRNFMQLIHDDSLTFKEDIQKAQVSGQGDSLHEHIANLAGSPAIKKGILQTVKVVDELVKVMGRHKPENIVIEMARENQTTQKGQKNSRERMKRIEEGIKELGSQILKEHPVENTQLQNEKLYLYYLQNGRDMYVDQELDINRLSDYDVDHIVPQSFLKDDSIDNKVLTRSDKARGKSDNVPSEEVVKKMKNYWRQLLNAKLITQRKFDNLTKAERGGLSELDKAGFIKRQLVETRQITKHVAQILDSRMNTKYDENDKLIREVKVITLKSKLVSDFRKDFQFYKVREINNYHHAHDAYLNAVVGTALIKKYPKLESEFVYGDYKVYDVRKMIAKSEQEIGKATAKYFFYSNIMNFFKTEITLANGEIRKRPLIETNGETGEIVWDKGRDFATVRKVLSMPQVNIVKKTEVQTGGFSKESILPKRNSDKLIARKKDWDPKKYGGFDSPTVAYSVLVVAKVEKGKSKKLKSVKELLGITIMERSSFEKNPIDFLEAKGYKEVKKDLIIKLPKYSLFELENGRKRMLASAGELQKGNELALPSKYVNFLYLASHYEKLKGSPEDNEQKQLFVEQHKHYLDEIIEQISEFSKRVILADANLDKVLSAYNKHRDKPIREQAENIIHLFTLTNLGAPAAFKYFDTTIDRKRYTSTKEVLDATLIHQSITGLYETRIDLSQLGGDGGGGGGGSEAAAKGGTLGDQGSRGSDPLPEPRVTLTVEGIPTEFLVNTGAEHSVLTKPMGKMGSKRTVVAGATGSKVYPWTTKRLLKIGQKQVTHSFLVIPECPAPLLGRDLLTKLKAQIQFSTEGPQVTWEDRPAMCLVLNLEEEYRLHEKPVPPSIDPSWLQLFPMVWAEKAGMGLANQVPPVVVELKSDASPVAVRQYPMSKEAREGIRPHIQRFLDLGILVPCQSPWNTPLLPVKKPGTNDYRPVQDLREVNKRVQDIHPTVPNPYNLLSSLPPSHTWYSVLDLKDAFFCLKLHPNSQPLFAFEWRDPEKGNTGQLTWTRLPQGFKNSPTLFNEALHRDLASFRALNPQVVMLQYVDDLLVAAPTYRDCKEGTRRLLQELSKLGYRVSAKKAQLCREEVTYLGYLLKGGKRWLTPARKATVMKIPTPTTPRQVREFLGTAGFCRLWIPGFASLAAPLYPLTRPKVPFTWTEAHQEAFGRIKEALLSAPALALPDLTKPFALYVDEKEGVARGVLTQTLGPWRRPVAYLSKKLDPVASGWPTCLKAIAAVALLLKDADKLTLGQNVLVIAPHNLESIVRQPPDRWMTNARMTHYQSLLLNERVSFAPPAILNPATLLPVESDDTPIHICSEILAEETGTRPDLRDQPLPGVPAWYTDGSSFIMDGRRQAGAAIVDNKRTVWASNLPEGTSAQKAELIALTQALRLAEGKSINIYTDSRYAFATAHVHGAIYKQRGWLTSAGKDIKNKEEILALLEAIHLPKRVAIIHCPGHQRGTDPVATGNRKADEAAKQAAQSTRILTETTKNAGKRTADGSEFEKRTADGSEFESPKKKAKVE

SEQ ID NO: 6917 - protein, 2096 aa, synthetic construct
MPAAKRVKLDGGDKKYSIGLDIGTNSVGWAVITDEYKVPSKKFKVLGNTDRHSIKKNLIGALLFDSGETAEATRLKRTARRRYTRRKNRICYLQEIFSNEMAKVDDSFFHRLEESFLVEEDKKHERHPIFGNIVDEVAYHEKYPTIYHLRKKLVDSTDKADLRLIYLALAHMIKFRGHFLIEGDLNPDNSDVDKLFIQLVQTYNQLFEENPINASGVDAKAILSARLSKSRRLENLIAQLPGEKKNGLFGNLIALSLGLTPNFKSNFDLAEDAKLQLSKDTYDDDLDNLLAQIGDQYADLFLAAKNLSDAILLSDILRVNTEITKAPLSASMIKRYDEHHQDLTLLKALVRQQLPEKYKEIFFDQSKNGYAGYIDGGASQEEFYKFIKPILEKMDGTEELLVKLNREDLLRKQRTFDNGSIPHQIHLGELHAILRRQEDFYPFLKDNREKIEKILTFRIPYYVGPLARGNSRFAWMTRKSEETITPWNFEEVVDKGASAQSFIERMTNFDKNLPNEKVLPKHSLLYEYFTVYNELTKVKYVTEGMRKPAFLSGEQKKAIVDLLFKTNRKVTVKQLKEDYFKKIECFDSVEISGVEDRFNASLGTYHDLLKIIKDKDFLDNEENEDILEDIVLTLTLFEDREMIEERLKTYAHLFDDKVMKQLKRRRYTGWGRLSRKLINGIRDKQSGKTILDFLKSDGFANRNFMQLIHDDSLTFKEDIQKAQVSGQGDSLHEHIANLAGSPAIKKGILQTVKVVDELVKVMGRHKPENIVIEMARENQTTQKGQKNSRERMKRIEEGIKELGSQILKEHPVENTQLQNEKLYLYYLQNGRDMYVDQELDINRLSDYDVDHIVPQSFLKDDSIDNKVLTRSDKARGKSDNVPSEEVVKKMKNYWRQLLNAKLITQRKFDNLTKAERGGLSELDKAGFIKRQLVETRQITKHVAQILDSRMNTKYDENDKLIREVKVITLKSKLVSDFRKDFQFYKVREINNYHHAHDAYLNAVVGTALIKKYPKLESEFVYGDYKVYDVRKMIAKSEQEIGKATAKYFFYSNIMNFFKTEITLANGEIRKRPLIETNGETGEIVWDKGRDFATVRKVLSMPQVNIVKKTEVQTGGFSKESILPKRNSDKLIARKKDWDPKKYGGFDSPTVAYSVLVVAKVEKGKSKKLKSVKELLGITIMERSSFEKNPIDFLEAKGYKEVKKDLIIKLPKYSLFELENGRKRMLASAGELQKGNELALPSKYVNFLYLASHYEKLKGSPEDNEQKQLFVEQHKHYLDEIIEQISEFSKRVILADANLDKVLSAYNKHRDKPIREQAENIIHLFTLTNLGAPAAFKYFDTTIDRKRYTSTKEVLDATLIHQSITGLYETRIDLSQLGGDGGGGGGGSEAAAKGGTLNLEDEYRLYETSAEPEVSPGSTWLSDFPQAWAETGGMGLAVRQAPLIIPLKATSTPVSIKQYPMSQEAKLGIKPHIQRLLDQGILVPCQSPWNTPLLPVKKPGTNDYRPVQDLREVNKRVEDIHPTVPNPYNLLSGLPPSHRWYTVLDLKDAFFCLRLHPTSQPLFAFEWRDPGMGISGQLTWTRLPQGFKNSPTLFNEALHRDLADFRIQHPDLILLQYVDDILLAATSELDCQQGTRALLLTLGNLGYRASAKKAQLCQKQVKYLGYLLKEGQRWLTEARKETVMGQPTPKTPRQLREFLGTAGFCRLWIPGFAEMAAPLYPLTKPGTLFNWGPDQQKAYQEIKQALLTAPALGLPDLTKPFELFVDEKQGYAKGVLTQKLGPWRRPVAYLSKKLDPVAAGWPPCLRMVAAIAVLRKDAGKLTMGQPLVILAPHAVEALVKQPPDRWLSNARMTHYQAMLLDTDRVQFGPVVALNPATLLPLPEEGAPHDCLEILAETHGTRPDLTDQPIPDADHTWYTDGSSFLQEGQRKAGAAVTTETEVIWARALPAGTSAQRAELIALTQALKMAEGKRLNVYTDSRYAFATAHIHGEIYRRRGWLTSEGREIKNKSEILALLKALFLPKRLSIIHCLGHQKGDSAEARGNRLADQAAREAAIKTPPDTSTLLAGKRTADGSEFEKRTADGSEFESPKKKAKVE

SEQ ID NO: 6918 - protein, 2096 aa, synthetic construct
MPAAKRVKLDGGDKKYSIGLDIGTNSVGWAVITDEYKVPSKKFKVLGNTDRHSIKKNLIGALLFDSGETAEATRLKRTARRRYTRRKNRICYLQEIFSNEMAKVDDSFFHRLEESFLVEEDKKHERHPIFGNIVDEVAYHEKYPTIYHLRKKLVDSTDKADLRLIYLALAHMIKFRGHFLIEGDLNPDNSDVDKLFIQLVQTYNQLFEENPINASGVDAKAILSARLSKSRRLENLIAQLPGEKKNGLFGNLIALSLGLTPNFKSNFDLAEDAKLQLSKDTYDDDLDNLLAQIGDQYADLFLAAKNLSDAILLSDILRVNTEITKAPLSASMIKRYDEHHQDLTLLKALVRQQLPEKYKEIFFDQSKNGYAGYIDGGASQEEFYKFIKPILEKMDGTEELLVKLNREDLLRKQRTFDNGSIPHQIHLGELHAILRRQEDFYPFLKDNREKIEKILTFRIPYYVGPLARGNSRFAWMTRKSEETITPWNFEEVVDKGASAQSFIERMTNFDKNLPNEKVLPKHSLLYEYFTVYNELTKVKYVTEGMRKPAFLSGEQKKAIVDLLFKTNRKVTVKQLKEDYFKKIECFDSVEISGVEDRFNASLGTYHDLLKIIKDKDFLDNEENEDILEDIVLTLTLFEDREMIEERLKTYAHLFDDKVMKQLKRRRYTGWGRLSRKLINGIRDKQSGKTILDFLKSDGFANRNFMQLIHDDSLTFKEDIQKAQVSGQGDSLHEHIANLAGSPAIKKGILQTVKVVDELVKVMGRHKPENIVIEMARENQTTQKGQKNSRERMKRIEEGIKELGSQILKEHPVENTQLQNEKLYLYYLQNGRDMYVDQELDINRLSDYDVDHIVPQSFLKDDSIDNKVLTRSDKARGKSDNVPSEEVVKKMKNYWRQLLNAKLITQRKFDNLTKAERGGLSELDKAGFIKRQLVETRQITKHVAQILDSRMNTKYDENDKLIREVKVITLKSKLVSDFRKDFQFYKVREINNYHHAHDAYLNAVVGTALIKKYPKLESEFVYGDYKVYDVRKMIAKSEQEIGKATAKYFFYSNIMNFFKTEITLANGEIRKRPLIETNGETGEIVWDKGRDFATVRKVLSMPQVNIVKKTEVQTGGFSKESILPKRNSDKLIARKKDWDPKKYGGFDSPTVAYSVLVVAKVEKGKSKKLKSVKELLGITIMERSSFEKNPIDFLEAKGYKEVKKDLIIKLPKYSLFELENGRKRMLASAGELQKGNELALPSKYVNFLYLASHYEKLKGSPEDNEQKQLFVEQHKHYLDEIIEQISEFSKRVILADANLDKVLSAYNKHRDKPIREQAENIIHLFTLTNLGAPAAFKYFDTTIDRKRYTSTKEVLDATLIHQSITGLYETRIDLSQLGGDGGGGGGGSEAAAKGGTLNIEDEYRLHETSKGPDVPLGSTWLSDFPQAWAETGGMGLAFRQAPLIISLKATSTPVSIKQYPMSQEARLGIKPHIQRLLDQGILVPCQSPWNTPLLPVKKPGTNDYRPVQDLREVNKRVEDIHPTVPNPYNLLSGLPPSHQWYTVLDLKDAFFCLRLHPTSQSLFAFEWKDPEMGISGQLTWTRLPQGFKNSPTLFDEALHRDLADFRIQHPDLILLQYVDDLLLAATSELDCQQGTRALLQTLGDLGYRASAKKAQICQKQVKYLGYLLKEGQRWLTEARKETVMGQPTPKTPRQLREFLGTAGLCRLWIPGFAEMAAPLYPLTKTGTLFKWGPDQQKAYQEIKQALLTAPALGLPDLTKPFELFVDEKQGYAKGVLTQKLGPWRRPVAYLSKKLDPVAAGWPPCLRMVAAIAVLTKDVGKLTMGQPLVILAPHAVEALVKQPPDRWLSNARMTHYQALLLDTDRVQFGPIVALNPATLLPLPEEGLQHDCLDILAEAHGTRPDLTDQPLPDADHTWYTDGSSFLQEGQRRAGAAVTTETEVIWAKALPAGTSAQRAELIALTQALKMAAGKKLNVYTDSRYAFATAHIHGEIYRRRGLLTSEGKEIKNKDEILALLKALFLPKRLSIIHCPGHQKGNHAEARGNRMADQAAREVATRETPETSTLLAGKRTADGSEFEKRTADGSEFESPKKKAKVE

SEQ ID NO: 6919 - protein, 2096 aa, synthetic construct
MPAAKRVKLDGGDKKYSIGLDIGTNSVGWAVITDEYKVPSKKFKVLGNTDRHSIKKNLIGALLFDSGETAEATRLKRTARRRYTRRKNRICYLQEIFSNEMAKVDDSFFHRLEESFLVEEDKKHERHPIFGNIVDEVAYHEKYPTIYHLRKKLVDSTDKADLRLIYLALAHMIKFRGHFLIEGDLNPDNSDVDKLFIQLVQTYNQLFEENPINASGVDAKAILSARLSKSRRLENLIAQLPGEKKNGLFGNLIALSLGLTPNFKSNFDLAEDAKLQLSKDTYDDDLDNLLAQIGDQYADLFLAAKNLSDAILLSDILRVNTEITKAPLSASMIKRYDEHHQDLTLLKALVRQQLPEKYKEIFFDQSKNGYAGYIDGGASQEEFYKFIKPILEKMDGTEELLVKLNREDLLRKQRTFDNGSIPHQIHLGELHAILRRQEDFYPFLKDNREKIEKILTFRIPYYVGPLARGNSRFAWMTRKSEETITPWNFEEVVDKGASAQSFIERMTNFDKNLPNEKVLPKHSLLYEYFTVYNELTKVKYVTEGMRKPAFLSGEQKKAIVDLLFKTNRKVTVKQLKEDYFKKIECFDSVEISGVEDRFNASLGTYHDLLKIIKDKDFLDNEENEDILEDIVLTLTLFEDREMIEERLKTYAHLFDDKVMKQLKRRRYTGWGRLSRKLINGIRDKQSGKTILDFLKSDGFANRNFMQLIHDDSLTFKEDIQKAQVSGQGDSLHEHIANLAGSPAIKKGILQTVKVVDELVKVMGRHKPENIVIEMARENQTTQKGQKNSRERMKRIEEGIKELGSQILKEHPVENTQLQNEKLYLYYLQNGRDMYVDQELDINRLSDYDVDHIVPQSFLKDDSIDNKVLTRSDKARGKSDNVPSEEVVKKMKNYWRQLLNAKLITQRKFDNLTKAERGGLSELDKAGFIKRQLVETRQITKHVAQILDSRMNTKYDENDKLIREVKVITLKSKLVSDFRKDFQFYKVREINNYHHAHDAYLNAVVGTALIKKYPKLESEFVYGDYKVYDVRKMIAKSEQEIGKATAKYFFYSNIMNFFKTEITLANGEIRKRPLIETNGETGEIVWDKGRDFATVRKVLSMPQVNIVKKTEVQTGGFSKESILPKRNSDKLIARKKDWDPKKYGGFDSPTVAYSVLVVAKVEKGKSKKLKSVKELLGITIMERSSFEKNPIDFLEAKGYKEVKKDLIIKLPKYSLFELENGRKRMLASAGELQKGNELALPSKYVNFLYLASHYEKLKGSPEDNEQKQLFVEQHKHYLDEIIEQISEFSKRVILADANLDKVLSAYNKHRDKPIREQAENIIHLFTLTNLGAPAAFKYFDTTIDRKRYTSTKEVLDATLIHQSITGLYETRIDLSQLGGDGGGGGGGSEAAAKGGTLNIEDEYRLHETSKGPDVPLGSTWLSDFPQAWAETGGMGLAVRQAPLIIPLKATSTPVSIKQYPMSQEARLGIKPHIQRLLDQGILVPCQSPWNTPLLPVKKPGTNDYRPVQDLREVNKRVEDIHPTVPNPYNLLSGLPPSHQWYTVLDLKDAFFCLRLHPTSQSLFAFEWRDPEMGISGQLTWTRLPQGFKNSPTLFNEALHRDLADFRIQHPDLILLQYVDDLLLAATSELDCQQGTRALLQTLGDLGYRASAKKAQICQKQVKYLGYLLKEGQRWLTEARKETVMGQPTPKTPRQLREFLGTAGFCRLWIPGFAEMAAPLYPLTKPGTLFEWGPDQQKAYQEIKQALLTAPALGLPDLTKPFELFVDEKQGYAKGVLTQKLGPWRRPVAYLSKKLDPVAAGWPPCLRMVAAIAVLTKDAGKLTMGQPLVILAPHAVEALVKQPPDRWLSNARMTHYQALLLDTDRVQFGPIVALNPATLLPLPEEGLQHDCLDILAEAHGTRPDLTDQPLPDADHTWYTDGSSFLQEGQRKAGAAVTTETEVVWAKALPAGTSAQRAELIALTQALKMAEGKKLNVYTDSRYAFATAHIHGEIYRRRGWLTSEGKEIKNKDEILALLKALFLPKRLSIIHCPGHQKGNRAEARGNRMADQAAREVATRETPETSTLLAGKRTADGSEFEKRTADGSEFESPKKKAKVE

SEQ ID NO: 6920 - protein, 2090 aa, synthetic construct
MPAAKRVKLDGGDKKYSIGLDIGTNSVGWAVITDEYKVPSKKFKVLGNTDRHSIKKNLIGALLFDSGETAEATRLKRTARRRYTRRKNRICYLQEIFSNEMAKVDDSFFHRLEESFLVEEDKKHERHPIFGNIVDEVAYHEKYPTIYHLRKKLVDSTDKADLRLIYLALAHMIKFRGHFLIEGDLNPDNSDVDKLFIQLVQTYNQLFEENPINASGVDAKAILSARLSKSRRLENLIAQLPGEKKNGLFGNLIALSLGLTPNFKSNFDLAEDAKLQLSKDTYDDDLDNLLAQIGDQYADLFLAAKNLSDAILLSDILRVNTEITKAPLSASMIKRYDEHHQDLTLLKALVRQQLPEKYKEIFFDQSKNGYAGYIDGGASQEEFYKFIKPILEKMDGTEELLVKLNREDLLRKQRTFDNGSIPHQIHLGELHAILRRQEDFYPFLKDNREKIEKILTFRIPYYVGPLARGNSRFAWMTRKSEETITPWNFEEVVDKGASAQSFIERMTNFDKNLPNEKVLPKHSLLYEYFTVYNELTKVKYVTEGMRKPAFLSGEQKKAIVDLLFKTNRKVTVKQLKEDYFKKIECFDSVEISGVEDRFNASLGTYHDLLKIIKDKDFLDNEENEDILEDIVLTLTLFEDREMIEERLKTYAHLFDDKVMKQLKRRRYTGWGRLSRKLINGIRDKQSGKTILDFLKSDGFANRNFMQLIHDDSLTFKEDIQKAQVSGQGDSLHEHIANLAGSPAIKKGILQTVKVVDELVKVMGRHKPENIVIEMARENQTTQKGQKNSRERMKRIEEGIKELGSQILKEHPVENTQLQNEKLYLYYLQNGRDMYVDQELDINRLSDYDVDHIVPQSFLKDDSIDNKVLTRSDKARGKSDNVPSEEVVKKMKNYWRQLLNAKLITQRKFDNLTKAERGGLSELDKAGFIKRQLVETRQITKHVAQILDSRMNTKYDENDKLIREVKVITLKSKLVSDFRKDFQFYKVREINNYHHAHDAYLNAVVGTALIKKYPKLESEFVYGDYKVYDVRKMIAKSEQEIGKATAKYFFYSNIMNFFKTEITLANGEIRKRPLIETNGETGEIVWDKGRDFATVRKVLSMPQVNIVKKTEVQTGGFSKESILPKRNSDKLIARKKDWDPKKYGGFDSPTVAYSVLVVAKVEKGKSKKLKSVKELLGITIMERSSFEKNPIDFLEAKGYKEVKKDLIIKLPKYSLFELENGRKRMLASAGELQKGNELALPSKYVNFLYLASHYEKLKGSPEDNEQKQLFVEQHKHYLDEIIEQISEFSKRVILADANLDKVLSAYNKHRDKPIREQAENIIHLFTLTNLGAPAAFKYFDTTIDRKRYTSTKEVLDATLIHQSITGLYETRIDLSQLGGDGGGGGGGSEAAAKGGTLQLDDEYRLYSPLVKPDQNIQFWLEQFPQAWAETAGMGLAKQVPPQVIQLKASATPVSVRQYPLSKEAQEGIRPHVQRLIQQGILVPVQSPWNTPLLPVRKPGTNDYRPVQDLREVNKRVQDIHPTVPNPYNLLCALPPQRSWYTVLDLKDAFFCLRLHPTSQPLFAFEWRDPGTGRTGQLTWTRLPQGFKNSPTIFDEALHRDLANFRIQHPQVTLLQYVDDLLLAGATKQDCLEGTKALLLELSDLGYRASAKKAQICRREVTYLGYSLRDGQRWLTEARKKTVVQIPAPTTAKQVREFLGTAGFCRLWIPGFATLAAPLYPLTKEKGEFSWAPEHQKAFDAIKKALLSAPALALPDVTKPFTLYVDERKGVARGVLTQTLGPWRRPVAYLSKKLDPVASGWPVCLKAIAAVAILVKDADKLTLGQNITVIAPHALENIVRQPPDRWMTNARMTHYQSLLLTERVTFAPPAALNPATLLPEETDEPVTHDCHQLLIEETGVRKDLTDIPLTGEVLTWFTDGSSYVVEGKRMAGAAVVDGTRTIWASSLPEGTSAQKAELMALTQALRLAEGKSINIYTDSRYAFATAHVHGAIYKQRGLLTSAGREIKNKEEILSLLEALHLPKRLAIIHCPGHQKAKDPISRGNQMADRVAKQAAQGVNLLAGKRTADGSEFEKRTADGSEFESPKKKAKVE

SEQ ID NO: 6921 - protein, 2087 aa, synthetic construct
MPAAKRVKLDGGDKKYSIGLDIGTNSVGWAVITDEYKVPSKKFKVLGNTDRHSIKKNLIGALLFDSGETAEATRLKRTARRRYTRRKNRICYLQEIFSNEMAKVDDSFFHRLEESFLVEEDKKHERHPIFGNIVDEVAYHEKYPTIYHLRKKLVDSTDKADLRLIYLALAHMIKFRGHFLIEGDLNPDNSDVDKLFIQLVQTYNQLFEENPINASGVDAKAILSARLSKSRRLENLIAQLPGEKKNGLFGNLIALSLGLTPNFKSNFDLAEDAKLQLSKDTYDDDLDNLLAQIGDQYADLFLAAKNLSDAILLSDILRVNTEITKAPLSASMIKRYDEHHQDLTLLKALVRQQLPEKYKEIFFDQSKNGYAGYIDGGASQEEFYKFIKPILEKMDGTEELLVKLNREDLLRKQRTFDNGSIPHQIHLGELHAILRRQEDFYPFLKDNREKIEKILTFRIPYYVGPLARGNSRFAWMTRKSEETITPWNFEEVVDKGASAQSFIERMTNFDKNLPNEKVLPKHSLLYEYFTVYNELTKVKYVTEGMRKPAFLSGEQKKAIVDLLFKTNRKVTVKQLKEDYFKKIECFDSVEISGVEDRFNASLGTYHDLLKIIKDKDFLDNEENEDILEDIVLTLTLFEDREMIEERLKTYAHLFDDKVMKQLKRRRYTGWGRLSRKLINGIRDKQSGKTILDFLKSDGFANRNFMQLIHDDSLTFKEDIQKAQVSGQGDSLHEHIANLAGSPAIKKGILQTVKVVDELVKVMGRHKPENIVIEMARENQTTQKGQKNSRERMKRIEEGIKELGSQILKEHPVENTQLQNEKLYLYYLQNGRDMYVDQELDINRLSDYDVDHIVPQSFLKDDSIDNKVLTRSDKARGKSDNVPSEEVVKKMKNYWRQLLNAKLITQRKFDNLTKAERGGLSELDKAGFIKRQLVETRQITKHVAQILDSRMNTKYDENDKLIREVKVITLKSKLVSDFRKDFQFYKVREINNYHHAHDAYLNAVVGTALIKKYPKLESEFVYGDYKVYDVRKMIAKSEQEIGKATAKYFFYSNIMNFFKTEITLANGEIRKRPLIETNGETGEIVWDKGRDFATVRKVLSMPQVNIVKKTEVQTGGFSKESILPKRNSDKLIARKKDWDPKKYGGFDSPTVAYSVLVVAKVEKGKSKKLKSVKELLGITIMERSSFEKNPIDFLEAKGYKEVKKDLIIKLPKYSLFELENGRKRMLASAGELQKGNELALPSKYVNFLYLASHYEKLKGSPEDNEQKQLFVEQHKHYLDEIIEQISEFSKRVILADANLDKVLSAYNKHRDKPIREQAENIIHLFTLTNLGAPAAFKYFDTTIDRKRYTSTKEVLDATLIHQSITGLYETRIDLSQLGGDGGGGGGGSEAAAKGGVPWLMKKPLQLTVLVPLHEYQERLLQQTALPKEQKELLQKLFLKYDALWQHWENQVGHRRIKPHNIATGTLAPRPQKQYPINPKAKPSIQIVIDDLLKQGVLIQQNSTMNTPVYPVPKPDGKWRMVLDYREVNKTIPLIAAQNQHSAGILSSIYRGKYKTTLDLTNGFWAHPITPESYWLTAFTWQGKQYCWTRLPQGFLNSPALFTADVVDLLKEIPNVQAYVDDIYISHDDPQEHLEQLEKIFSILLNAGYVVSLKKSEIAQREVEFLGFNITKEGRGLTDTFKQKLLNITPPKDLKQLQSILGLLNFARNFIPNYSELVKPLYTIVANANGKFISWTEDNSNQLQHIISVLNQADNLEERNPETRLIIKVNSSPSAGYIRYYNEGSKRPIMYVNYIFSKAEAKFTQTEKLLTTMHKGLIKAMDLAMGQEILVYSPIVSMTKIQRTPLPERKALPVRWITWMTYLEDPRIQFHYDKSLPELQQIPNVTEDVIAKTKHPSEFAMVFYTDGSAIKHPDVNKSHSAGMGIAQVQFIPEYKIVHQWSIPLGDHTAQLAEIAAVEFACKKALKISGPVLIVTDSFYVAESANKELPYWKSNGFLNNKKKPLRHVSKWKSIAECLQLKPDIIIMHEKGHQQPMTTLHTEGNNLADKLATQGSYVVHAGKRTADGSEFEKRTADGSEFESPKKKAKVE

SEQ ID NO: 6922 - protein, 2087 aa, synthetic construct
MPAAKRVKLDGGDKKYSIGLDIGTNSVGWAVITDEYKVPSKKFKVLGNTDRHSIKKNLIGALLFDSGETAEATRLKRTARRRYTRRKNRICYLQEIFSNEMAKVDDSFFHRLEESFLVEEDKKHERHPIFGNIVDEVAYHEKYPTIYHLRKKLVDSTDKADLRLIYLALAHMIKFRGHFLIEGDLNPDNSDVDKLFIQLVQTYNQLFEENPINASGVDAKAILSARLSKSRRLENLIAQLPGEKKNGLFGNLIALSLGLTPNFKSNFDLAEDAKLQLSKDTYDDDLDNLLAQIGDQYADLFLAAKNLSDAILLSDILRVNTEITKAPLSASMIKRYDEHHQDLTLLKALVRQQLPEKYKEIFFDQSKNGYAGYIDGGASQEEFYKFIKPILEKMDGTEELLVKLNREDLLRKQRTFDNGSIPHQIHLGELHAILRRQEDFYPFLKDNREKIEKILTFRIPYYVGPLARGNSRFAWMTRKSEETITPWNFEEVVDKGASAQSFIERMTNFDKNLPNEKVLPKHSLLYEYFTVYNELTKVKYVTEGMRKPAFLSGEQKKAIVDLLFKTNRKVTVKQLKEDYFKKIECFDSVEISGVEDRFNASLGTYHDLLKIIKDKDFLDNEENEDILEDIVLTLTLFEDREMIEERLKTYAHLFDDKVMKQLKRRRYTGWGRLSRKLINGIRDKQSGKTILDFLKSDGFANRNFMQLIHDDSLTFKEDIQKAQVSGQGDSLHEHIANLAGSPAIKKGILQTVKVVDELVKVMGRHKPENIVIEMARENQTTQKGQKNSRERMKRIEEGIKELGSQILKEHPVENTQLQNEKLYLYYLQNGRDMYVDQELDINRLSDYDVDHIVPQSFLKDDSIDNKVLTRSDKARGKSDNVPSEEVVKKMKNYWRQLLNAKLITQRKFDNLTKAERGGLSELDKAGFIKRQLVETRQITKHVAQILDSRMNTKYDENDKLIREVKVITLKSKLVSDFRKDFQFYKVREINNYHHAHDAYLNAVVGTALIKKYPKLESEFVYGDYKVYDVRKMIAKSEQEIGKATAKYFFYSNIMNFFKTEITLANGEIRKRPLIETNGETGEIVWDKGRDFATVRKVLSMPQVNIVKKTEVQTGGFSKESILPKRNSDKLIARKKDWDPKKYGGFDSPTVAYSVLVVAKVEKGKSKKLKSVKELLGITIMERSSFEKNPIDFLEAKGYKEVKKDLIIKLPKYSLFELENGRKRMLASAGELQKGNELALPSKYVNFLYLASHYEKLKGSPEDNEQKQLFVEQHKHYLDEIIEQISEFSKRVILADANLDKVLSAYNKHRDKPIREQAENIIHLFTLTNLGAPAAFKYFDTTIDRKRYTSTKEVLDATLIHQSITGLYETRIDLSQLGGDGGGGGGGSEAAAKGGVPWLMKKPLQLTVLVPLHEYQERLLQQTALPKEQKELLQKLFLKYDALWQHWENQVGHRRIKPHNIATGTLAPRPQKQYPINPKAKPSIQIVIDDLLKQGVLIQQNSTMNTPVYPVPKPDGKWRMVLDYREVNKTIPLIAAQNQHSAGILSSIYRGKYKTTLDLTNGFWAHPITPESYWLTAFTWQGKQYCWTRLPQGFLNSPALFNADVVDLLKEIPNVQAYVDDIYISHDDPQEHLEQLEKIFSILLNAGYVVSLKKSEIAQREVEFLGFNITKEGRGLTDTFKQKLLNITPPKDLKQLQSILGLLNFARNFIPNYSELVKPLYTIVAPANGKFISWTEDNSNQLQHIISVLNQADNLEERNPETRLIIKVNSSPSAGYIRYYNEGSKRPIMYVNYIFSKAEAKFTQTEKLLTTMHKGLIKAMDLAMGQEILVYSPIVSMTKIQRTPLPERKALPVRWITWMTYLEDPRIQFHYDKSLPELQQIPNVTEDVIAKTKHPSEFAMVFYTDGSAIKHPDVNKSHSAGMGIAQVQFIPEYKIVHQWSIPLGDHTAQLAEIAAVEFACKKALKISGPVLIVTDSFYVAESANKELPYWKSNGFLNNKKKPLRHVSKWKSIAECLQLKPDIIIMHEKGHQQPMTTLHTEGNNLADKLATQGSYVVHAGKRTADGSEFEKRTADGSEFESPKKKAKVE

SEQ ID NO: 6923 - protein, 2087 aa, synthetic construct
MPAAKRVKLDGGDKKYSIGLDIGTNSVGWAVITDEYKVPSKKFKVLGNTDRHSIKKNLIGALLFDSGETAEATRLKRTARRRYTRRKNRICYLQEIFSNEMAKVDDSFFHRLEESFLVEEDKKHERHPIFGNIVDEVAYHEKYPTIYHLRKKLVDSTDKADLRLIYLALAHMIKFRGHFLIEGDLNPDNSDVDKLFIQLVQTYNQLFEENPINASGVDAKAILSARLSKSRRLENLIAQLPGEKKNGLFGNLIALSLGLTPNFKSNFDLAEDAKLQLSKDTYDDDLDNLLAQIGDQYADLFLAAKNLSDAILLSDILRVNTEITKAPLSASMIKRYDEHHQDLTLLKALVRQQLPEKYKEIFFDQSKNGYAGYIDGGASQEEFYKFIKPILEKMDGTEELLVKLNREDLLRKQRTFDNGSIPHQIHLGELHAILRRQEDFYPFLKDNREKIEKILTFRIPYYVGPLARGNSRFAWMTRKSEETITPWNFEEVVDKGASAQSFIERMTNFDKNLPNEKVLPKHSLLYEYFTVYNELTKVKYVTEGMRKPAFLSGEQKKAIVDLLFKTNRKVTVKQLKEDYFKKIECFDSVEISGVEDRFNASLGTYHDLLKIIKDKDFLDNEENEDILEDIVLTLTLFEDREMIEERLKTYAHLFDDKVMKQLKRRRYTGWGRLSRKLINGIRDKQSGKTILDFLKSDGFANRNFMQLIHDDSLTFKEDIQKAQVSGQGDSLHEHIANLAGSPAIKKGILQTVKVVDELVKVMGRHKPENIVIEMARENQTTQKGQKNSRERMKRIEEGIKELGSQILKEHPVENTQLQNEKLYLYYLQNGRDMYVDQELDINRLSDYDVDHIVPQSFLKDDSIDNKVLTRSDKARGKSDNVPSEEVVKKMKNYWRQLLNAKLITQRKFDNLTKAERGGLSELDKAGFIKRQLVETRQITKHVAQILDSRMNTKYDENDKLIREVKVITLKSKLVSDFRKDFQFYKVREINNYHHAHDAYLNAVVGTALIKKYPKLESEFVYGDYKVYDVRKMIAKSEQEIGKATAKYFFYSNIMNFFKTEITLANGEIRKRPLIETNGETGEIVWDKGRDFATVRKVLSMPQVNIVKKTEVQTGGFSKESILPKRNSDKLIARKKDWDPKKYGGFDSPTVAYSVLVVAKVEKGKSKKLKSVKELLGITIMERSSFEKNPIDFLEAKGYKEVKKDLIIKLPKYSLFELENGRKRMLASAGELQKGNELALPSKYVNFLYLASHYEKLKGSPEDNEQKQLFVEQHKHYLDEIIEQISEFSKRVILADANLDKVLSAYNKHRDKPIREQAENIIHLFTLTNLGAPAAFKYFDTTIDRKRYTSTKEVLDATLIHQSITGLYETRIDLSQLGGDGGGGGGGSEAAAKGGIPWLMKKPLQLTTLVPLQEYEERLLKQTMLTGSYKEKLQSLFLKYDALWQHWENQVGHRRIKPHHIATGTVNPRPQKQYPINPKAKASIQTVINDLLKQGVLIQQNSIMNTPVYPVPKPDGKWRMVLDYREVNKTIPLIAAQNQHSAGILSSIFRGKYKTTLDLSNGFWAHSITPESYWLTAFTWLGQQYCWTRLPQGFLNSPALFNADVVDLLKEVPNVQVYVDDIYISHDDPREHLEQLEKVFSLLLNAGYVVSLKKSEIAQHEVEFLGFNITKEGRGLTETFKQKLLNITPPRDLKQLQSILGKLNFARNFIPNFSELVKPLYNIIATAPGKYITWTTDNSQQLQNIISMLNSAENLEERNPEVRLIMKVNTSPSAGYIRFYNEFAKRPIMYLNYVYTKAEVKFTNTEKLLTTIHKGLIKALDLGMGQEILVYSPIVSMTKIQKTPLPERKALPIRWITWMSYLEDPRIQFHYDKTLPELQQVPTVTDDIIAKIKHPSEFSMVFYTDGSAIKHPNVNKSHNAGMGIAQVQFKPEFTVINTWSIPLGDHTAQLAEVAAVEFACKKALKIDGPVLIVTDSFYVAESVNKELPYWQSNGFFNNKKKPLKHVSKWKSIADCIQLKPDIIIIHEKGHQPTASTFHTEGNNLADKLATQGSYVVNAGKRTADGSEFEKRTADGSEFESPKKKAKVE

SEQ ID NO: 6924 - protein, 2094 aa, synthetic construct
MPAAKRVKLDGGDKKYSIGLDIGTNSVGWAVITDEYKVPSKKFKVLGNTDRHSIKKNLIGALLFDSGETAEATRLKRTARRRYTRRKNRICYLQEIFSNEMAKVDDSFFHRLEESFLVEEDKKHERHPIFGNIVDEVAYHEKYPTIYHLRKKLVDSTDKADLRLIYLALAHMIKFRGHFLIEGDLNPDNSDVDKLFIQLVQTYNQLFEENPINASGVDAKAILSARLSKSRRLENLIAQLPGEKKNGLFGNLIALSLGLTPNFKSNFDLAEDAKLQLSKDTYDDDLDNLLAQIGDQYADLFLAAKNLSDAILLSDILRVNTEITKAPLSASMIKRYDEHHQDLTLLKALVRQQLPEKYKEIFFDQSKNGYAGYIDGGASQEEFYKFIKPILEKMDGTEELLVKLNREDLLRKQRTFDNGSIPHQIHLGELHAILRRQEDFYPFLKDNREKIEKILTFRIPYYVGPLARGNSRFAWMTRKSEETITPWNFEEVVDKGASAQSFIERMTNFDKNLPNEKVLPKHSLLYEYFTVYNELTKVKYVTEGMRKPAFLSGEQKKAIVDLLFKTNRKVTVKQLKEDYFKKIECFDSVEISGVEDRFNASLGTYHDLLKIIKDKDFLDNEENEDILEDIVLTLTLFEDREMIEERLKTYAHLFDDKVMKQLKRRRYTGWGRLSRKLINGIRDKQSGKTILDFLKSDGFANRNFMQLIHDDSLTFKEDIQKAQVSGQGDSLHEHIANLAGSPAIKKGILQTVKVVDELVKVMGRHKPENIVIEMARENQTTQKGQKNSRERMKRIEEGIKELGSQILKEHPVENTQLQNEKLYLYYLQNGRDMYVDQELDINRLSDYDVDHIVPQSFLKDDSIDNKVLTRSDKARGKSDNVPSEEVVKKMKNYWRQLLNAKLITQRKFDNLTKAERGGLSELDKAGFIKRQLVETRQITKHVAQILDSRMNTKYDENDKLIREVKVITLKSKLVSDFRKDFQFYKVREINNYHHAHDAYLNAVVGTALIKKYPKLESEFVYGDYKVYDVRKMIAKSEQEIGKATAKYFFYSNIMNFFKTEITLANGEIRKRPLIETNGETGEIVWDKGRDFATVRKVLSMPQVNIVKKTEVQTGGFSKESILPKRNSDKLIARKKDWDPKKYGGFDSPTVAYSVLVVAKVEKGKSKKLKSVKELLGITIMERSSFEKNPIDFLEAKGYKEVKKDLIIKLPKYSLFELENGRKRMLASAGELQKGNELALPSKYVNFLYLASHYEKLKGSPEDNEQKQLFVEQHKHYLDEIIEQISEFSKRVILADANLDKVLSAYNKHRDKPIREQAENIIHLFTLTNLGAPAAFKYFDTTIDRKRYTSTKEVLDATLIHQSITGLYETRIDLSQLGGDGGGGGGGSEAAAKGGVLNLEEEYRLHEKPVPSSIDPSWLQLFPTVWAERAGMGLANQVPPVVVELRSGASPVAVRQYPMSKEAREGIRPHIQRFLDLGVLVPCQSPWNTPLLPVKKPGTNDYRPVQDLREINKRVQDIHPTVPNPYNLLSSLPPSHTWYSVLDLKDAFFCLKLHPNSQPLFAFEWRDPEKGNTGQLTWTRLPQGFKNSPTLFNEALHRDLAPFRALNPQVVLLQYVDDLLVAAPTYRDCKEGTQKLLQELSKLGYRVSAKKAQLCQKEVTYLGYLLKEGKRWLTPARKATVMKIPPPTTPRQVREFLGKAGFCRLFIPGFASLAAPLYPLTKPSIPFIWTEEHQKAFDRIKEALLSAPALALPDLTKPFTLYVDERAGVARGVLTQTLGPWRRPVAYLSKKLDPVASGWPTCLKAVAAVALLLKDADKLTLGQNVTVIASHSLESIVRQPPDRWMTNARMTHYQSLLLNERVSFAPPAVLNPATLLPVESEATPVHRCSEILAEETGTRRDLKDQPLPGVPAWYTDGSSFIAEGKRRAGAAIVDGKRTVWASSLPEGTSAQKAELVALTQALRLAEGKDINIYTDSRYAFATAHIHGAIYKQRGWLTSAGKDIKNKEEILALLEAIHLPKRVAIIHCPGHQKGNDPVATGNRRADEAAKQAALSTRVLAETTKPAGKRTADGSEFEKRTADGSEFESPKKKAKVE

SEQ ID NO: 6925 - protein, 2096 aa, synthetic construct; identical to SEQ ID NO: 4519

SEQ ID NO: 6926 - protein, 2095 aa, synthetic construct
MPAAKRVKLDGGDKKYSIGLDIGTNSVGWAVITDEYKVPSKKFKVLGNTDRHSIKKNLIGALLFDSGETAEATRLKRTARRRYTRRKNRICYLQEIFSNEMAKVDDSFFHRLEESFLVEEDKKHERHPIFGNIVDEVAYHEKYPTIYHLRKKLVDSTDKADLRLIYLALAHMIKFRGHFLIEGDLNPDNSDVDKLFIQLVQTYNQLFEENPINASGVDAKAILSARLSKSRRLENLIAQLPGEKKNGLFGNLIALSLGLTPNFKSNFDLAEDAKLQLSKDTYDDDLDNLLAQIGDQYADLFLAAKNLSDAILLSDILRVNTEITKAPLSASMIKRYDEHHQDLTLLKALVRQQLPEKYKEIFFDQSKNGYAGYIDGGASQEEFYKFIKPILEKMDGTEELLVKLNREDLLRKQRTFDNGSIPHQIHLGELHAILRRQEDFYPFLKDNREKIEKILTFRIPYYVGPLARGNSRFAWMTRKSEETITPWNFEEVVDKGASAQSFIERMTNFDKNLPNEKVLPKHSLLYEYFTVYNELTKVKYVTEGMRKPAFLSGEQKKAIVDLLFKTNRKVTVKQLKEDYFKKIECFDSVEISGVEDRFNASLGTYHDLLKIIKDKDFLDNEENEDILEDIVLTLTLFEDREMIEERLKTYAHLFDDKVMKQLKRRRYTGWGRLSRKLINGIRDKQSGKTILDFLKSDGFANRNFMQLIHDDSLTFKEDIQKAQVSGQGDSLHEHIANLAGSPAIKKGILQTVKVVDELVKVMGRHKPENIVIEMARENQTTQKGQKNSRERMKRIEEGIKELGSQILKEHPVENTQLQNEKLYLYYLQNGRDMYVDQELDINRLSDYDVDHIVPQSFLKDDSIDNKVLTRSDKARGKSDNVPSEEVVKKMKNYWRQLLNAKLITQRKFDNLTKAERGGLSELDKAGFIKRQLVETRQITKHVAQILDSRMNTKYDENDKLIREVKVITLKSKLVSDFRKDFQFYKVREINNYHHAHDAYLNAVVGTALIKKYPKLESEFVYGDYKVYDVRKMIAKSEQEIGKATAKYFFYSNIMNFFKTEITLANGEIRKRPLIETNGETGEIVWDKGRDFATVRKVLSMPQVNIVKKTEVQTGGFSKESILPKRNSDKLIARKKDWDPKKYGGFDSPTVAYSVLVVAKVEKGKSKKLKSVKELLGITIMERSSFEKNPIDFLEAKGYKEVKKDLIIKLPKYSLFELENGRKRMLASAGELQKGNELALPSKYVNFLYLASHYEKLKGSPEDNEQKQLFVEQHKHYLDEIIEQISEFSKRVILADANLDKVLSAYNKHRDKPIREQAENIIHLFTLTNLGAPAAFKYFDTTIDRKRYTSTKEVLDATLIHQSITGLYETRIDLSQLGGDGGGGGEAAAKGGSGGTLQLEEEYRLFEPESTQKQEMDIWLKNFPQAWAETGGMGTAHCQAPVLIQLKATATPISIRQYPMPHEAYQGIKPHIRRMLDQGILKPCQSPWNTPLLPVKKPGTEDYRPVQDLREVNKRVEDIHPTVPNPYNLLSTLPPSHPWYTVLDLKDAFFCLRLHSESQLLFAFEWRDPEIGLSGQLTWTRLPQGFKNSPTLFNEALHSDLADFRVRYPALVLLQYVDDLLLAAATRTECLEGTKALLETLGNKGYRASAKKAQICLQEVTYLGYSLKDGQRWLTKARKEAILSIPVPKNSRQVREFLGTAGYCRLWIPGFAELAAPLYPLTRPGTLFQWGTEQQLAFEDIKKALLSSPALGLPDITKPFELFIDENSGFAKGVLVQKLGPWKRPVAYLSKKLDTVASGWPPCLRMVAAIAILVKDAGKLTLGQPLTILTSHPVEALVRQPPNKWLSNARMTHYQAMLLDAERVHFGPTVSLNPATLLPLPSGGNHHDCLQILAETHGTRPDLTDQPLPDADLTWYTDGSSFIRNGEREAGAAVTTESEVIWAAPLPPGTSAQRAELIALTQALKMAEGKKLTVYTDSRYAFATTHVHGEIYRRRGWLTSEGKEIKNKNEILALLEALFLPKRLSIIHCPGHQKGDSPQAKGNRLADDTAKKAATETHSSLTVLPAGKRTADGSEFEKRTADGSEFESPKKKAKVE

SEQ ID NO: 6927 - protein, 2094 aa, synthetic construct
MPAAKRVKLDGGDKKYSIGLDIGTNSVGWAVITDEYKVPSKKFKVLGNTDRHSIKKNLIGALLFDSGETAEATRLKRTARRRYTRRKNRICYLQEIFSNEMAKVDDSFFHRLEESFLVEEDKKHERHPIFGNIVDEVAYHEKYPTIYHLRKKLVDSTDKADLRLIYLALAHMIKFRGHFLIEGDLNPDNSDVDKLFIQLVQTYNQLFEENPINASGVDAKAILSARLSKSRRLENLIAQLPGEKKNGLFGNLIALSLGLTPNFKSNFDLAEDAKLQLSKDTYDDDLDNLLAQIGDQYADLFLAAKNLSDAILLSDILRVNTEITKAPLSASMIKRYDEHHQDLTLLKALVRQQLPEKYKEIFFDQSKNGYAGYIDGGASQEEFYKFIKPILEKMDGTEELLVKLNREDLLRKQRTFDNGSIPHQIHLGELHAILRRQEDFYPFLKDNREKIEKILTFRIPYYVGPLARGNSRFAWMTRKSEETITPWNFEEVVDKGASAQSFIERMTNFDKNLPNEKVLPKHSLLYEYFTVYNELTKVKYVTEGMRKPAFLSGEQKKAIVDLLFKTNRKVTVKQLKEDYFKKIECFDSVEISGVEDRFNASLGTYHDLLKIIKDKDFLDNEENEDILEDIVLTLTLFEDREMIEERLKTYAHLFDDKVMKQLKRRRYTGWGRLSRKLINGIRDKQSGKTILDFLKSDGFANRNFMQLIHDDSLTFKEDIQKAQVSGQGDSLHEHIANLAGSPAIKKGILQTVKVVDELVKVMGRHKPENIVIEMARENQTTQKGQKNSRERMKRIEEGIKELGSQILKEHPVENTQLQNEKLYLYYLQNGRDMYVDQELDINRLSDYDVDHIVPQSFLKDDSIDNKVLTRSDKARGKSDNVPSEEVVKKMKNYWRQLLNAKLITQRKFDNLTKAERGGLSELDKAGFIKRQLVETRQITKHVAQILDSRMNTKYDENDKLIREVKVITLKSKLVSDFRKDFQFYKVREINNYHHAHDAYLNAVVGTALIKKYPKLESEFVYGDYKVYDVRKMIAKSEQEIGKATAKYFFYSNIMNFFKTEITLANGEIRKRPLIETNGETGEIVWDKGRDFATVRKVLSMPQVNIVKKTEVQTGGFSKESILPKRNSDKLIARKKDWDPKKYGGFDSPTVAYSVLVVAKVEKGKSKKLKSVKELLGITIMERSSFEKNPIDFLEAKGYKEVKKDLIIKLPKYSLFELENGRKRMLASAGELQKGNELALPSKYVNFLYLASHYEKLKGSPEDNEQKQLFVEQHKHYLDEIIEQISEFSKRVILADANLDKVLSAYNKHRDKPIREQAENIIHLFTLTNLGAPAAFKYFDTTIDRKRYTSTKEVLDATLIHQSITGLYETRIDLSQLGGDGGGGGEAAAKGGSGGVLNLEEEYRLHEKPVPSSIDPSWLQLFPTVWAERAGMGLANQVPPVVVELRSGASPVAVRQYPMSKEAREGIRPHIQKFLDLGVLVPCRSPWNTPLLPVKKPGTNDYRPVQDLREINKRVQDIHPTVPNPYNLLSSLPPSYTWYSVLDLKDAFFCLRLHPNSQPLFAFEWKDPEKGNTGQLTWTRLPQGFKNSPTLFNEALHRDLAPFRALNPQVVLLQYVDDLLVAAPTYEDCKKGTQKLLQELSKLGYRVSAKKAQLCQREVTYLGYLLKEGKRWLTPARKATVMKIPVPTTPRQVREFLGKAGFCRLFIPGFASLAAPLYPLTKPSIPFIWTEEHQQAFDHIKKALLSAPALALPDLTKPFTLYIDERAGVARGVLTQTLGPWRRPVAYLSKKLDPVASGWPTCLKAVAAVALLLKDADKLTLGQNVTVIASHSLESIVRQPPDRWMTNARMTHYQSLLLNERVSFAPPAVLNPATLLPVESEATPVHRCSEILAEETGTRRDLEDQPLPGVPTWYTDGSSFITEGKRRAGAPIVDGKRTVWASSLPEGTSAQKAELVALTQALRLAEGKNINIYTDSRYAFATAHIHGAIYKQRGWLTSAGKDIKNKEEILALLEAIHLPRRVAIIHCPGHQRGSNPVATGNRRADEAAKQAALSTRVLAGTTKPAGKRTADGSEFEKRTADGSEFESPKKKAKVE

SEQ ID NO: 6928 - protein, 2218 aa, synthetic construct
MPAAKRVKLDGGDKKYSIGLDIGTNSVGWAVITDEYKVPSKKFKVLGNTDRHSIKKNLIGALLFDSGETAEATRLKRTARRRYTRRKNRICYLQEIFSNEMAKVDDSFFHRLEESFLVEEDKKHERHPIFGNIVDEVAYHEKYPTIYHLRKKLVDSTDKADLRLIYLALAHMIKFRGHFLIEGDLNPDNSDVDKLFIQLVQTYNQLFEENPINASGVDAKAILSARLSKSRRLENLIAQLPGEKKNGLFGNLIALSLGLTPNFKSNFDLAEDAKLQLSKDTYDDDLDNLLAQIGDQYADLFLAAKNLSDAILLSDILRVNTEITKAPLSASMIKRYDEHHQDLTLLKALVRQQLPEKYKEIFFDQSKNGYAGYIDGGASQEEFYKFIKPILEKMDGTEELLVKLNREDLLRKQRTFDNGSIPHQIHLGELHAILRRQEDFYPFLKDNREKIEKILTFRIPYYVGPLARGNSRFAWMTRKSEETITPWNFEEVVDKGASAQSFIERMTNFDKNLPNEKVLPKHSLLYEYFTVYNELTKVKYVTEGMRKPAFLSGEQKKAIVDLLFKTNRKVTVKQLKEDYFKKIECFDSVEISGVEDRFNASLGTYHDLLKIIKDKDFLDNEENEDILEDIVLTLTLFEDREMIEERLKTYAHLFDDKVMKQLKRRRYTGWGRLSRKLINGIRDKQSGKTILDFLKSDGFANRNFMQLIHDDSLTFKEDIQKAQVSGQGDSLHEHIANLAGSPAIKKGILQTVKVVDELVKVMGRHKPENIVIEMARENQTTQKGQKNSRERMKRIEEGIKELGSQILKEHPVENTQLQNEKLYLYYLQNGRDMYVDQELDINRLSDYDVDHIVPQSFLKDDSIDNKVLTRSDKARGKSDNVPSEEVVKKMKNYWRQLLNAKLITQRKFDNLTKAERGGLSELDKAGFIKRQLVETRQITKHVAQILDSRMNTKYDENDKLIREVKVITLKSKLVSDFRKDFQFYKVREINNYHHAHDAYLNAVVGTALIKKYPKLESEFVYGDYKVYDVRKMIAKSEQEIGKATAKYFFYSNIMNFFKTEITLANGEIRKRPLIETNGETGEIVWDKGRDFATVRKVLSMPQVNIVKKTEVQTGGFSKESILPKRNSDKLIARKKDWDPKKYGGFDSPTVAYSVLVVAKVEKGKSKKLKSVKELLGITIMERSSFEKNPIDFLEAKGYKEVKKDLIIKLPKYSLFELENGRKRMLASAGELQKGNELALPSKYVNFLYLASHYEKLKGSPEDNEQKQLFVEQHKHYLDEIIEQISEFSKRVILADANLDKVLSAYNKHRDKPIREQAENIIHLFTLTNLGAPAAFKYFDTTIDRKRYTSTKEVLDATLIHQSITGLYETRIDLSQLGGDGGGGGEAAAKGGSGGTLGDQGSRGSDPLPEPRVTLTVEGIPTEFLVNTGAEHSVLTKPMGKMGSKRTVVAGATGSKVYPWTTKRLLKIGQKQVTHSFLVIPECPAPLLGRDLLTKLKAQIQFSTEGPQVTWEDRPAMCLVLNLEEEYRLHEKPVPPSIDPSWLQLFPMVWAEKAGMGLANQVPPVVVELKSDASPVAVRQYPMSKEAREGIRPHIQRFLDLGILVPCQSPWNTPLLPVKKPGTNDYRPVQDLREVNKRVQDIHPTVPNPYNLLSSLPPSHTWYSVLDLKDAFFCLKLHPNSQPLFAFEWRDPEKGNTGQLTWTRLPQGFKNSPTLFNEALHRDLASFRALNPQVVMLQYVDDLLVAAPTYRDCKEGTRRLLQELSKLGYRVSAKKAQLCREEVTYLGYLLKGGKRWLTPARKATVMKIPTPTTPRQVREFLGTAGFCRLWIPGFASLAAPLYPLTRPKVPFTWTEAHQEAFGRIKEALLSAPALALPDLTKPFALYVDEKEGVARGVLTQTLGPWRRPVAYLSKKLDPVASGWPTCLKAIAAVALLLKDADKLTLGQNVLVIAPHNLESIVRQPPDRWMTNARMTHYQSLLLNERVSFAPPAILNPATLLPVESDDTPIHICSEILAEETGTRPDLRDQPLPGVPAWYTDGSSFIMDGRRQAGAAIVDNKRTVWASNLPEGTSAQKAELIALTQALRLAEGKSINIYTDSRYAFATAHVHGAIYKQRGWLTSAGKDIKNKEEILALLEAIHLPKRVAIIHCPGHQRGTDPVATGNRKADEAAKQAAQSTRILTETTKNAGKRTADGSEFEKRTADGSEFESPKKKAKVE

SEQ ID NO: 6929 - protein, 2096 aa, synthetic construct
MPAAKRVKLDGGDKKYSIGLDIGTNSVGWAVITDEYKVPSKKFKVLGNTDRHSIKKNLIGALLFDSGETAEATRLKRTARRRYTRRKNRICYLQEIFSNEMAKVDDSFFHRLEESFLVEEDKKHERHPIFGNIVDEVAYHEKYPTIYHLRKKLVDSTDKADLRLIYLALAHMIKFRGHFLIEGDLNPDNSDVDKLFIQLVQTYNQLFEENPINASGVDAKAILSARLSKSRRLENLIAQLPGEKKNGLFGNLIALSLGLTPNFKSNFDLAEDAKLQLSKDTYDDDLDNLLAQIGDQYADLFLAAKNLSDAILLSDILRVNTEITKAPLSASMIKRYDEHHQDLTLLKALVRQQLPEKYKEIFFDQSKNGYAGYIDGGASQEEFYKFIKPILEKMDGTEELLVKLNREDLLRKQRTFDNGSIPHQIHLGELHAILRRQEDFYPFLKDNREKIEKILTFRIPYYVGPLARGNSRFAWMTRKSEETITPWNFEEVVDKGASAQSFIERMTNFDKNLPNEKVLPKHSLLYEYFTVYNELTKVKYVTEGMRKPAFLSGEQKKAIVDLLFKTNRKVTVKQLKEDYFKKIECFDSVEISGVEDRFNASLGTYHDLLKIIKDKDFLDNEENEDILEDIVLTLTLFEDREMIEERLKTYAHLFDDKVMKQLKRRRYTGWGRLSRKLINGIRDKQSGKTILDFLKSDGFANRNFMQLIHDDSLTFKEDIQKAQVSGQGDSLHEHIANLAGSPAIKKGILQTVKVVDELVKVMGRHKPENIVIEMARENQTTQKGQKNSRERMKRIEEGIKELGSQILKEHPVENTQLQNEKLYLYYLQNGRDMYVDQELDINRLSDYDVDHIVPQSFLKDDSIDNKVLTRSDKARGKSDNVPSEEVVKKMKNYWRQLLNAKLITQRKFDNLTKAERGGLSELDKAGFIKRQLVETRQITKHVAQILDSRMNTKYDENDKLIREVKVITLKSKLVSDFRKDFQFYKVREINNYHHAHDAYLNAVVGTALIKKYPKLESEFVYGDYKVYDVRKMIAKSEQEIGKATAKYFFYSNIMNFFKTEITLANGEIRKRPLIETNGETGEIVWDKGRDFATVRKVLSMPQVNIVKKTEVQTGGFSKESILPKRNSDKLIARKKDWDPKKYGGFDSPTVAYSVLVVAKVEKGKSKKLKSVKELLGITIMERSSFEKNPIDFLEAKGYKEVKKDLIIKLPKYSLFELENGRKRMLASAGELQKGNELALPSKYVNFLYLASHYEKLKGSPEDNEQKQLFVEQHKHYLDEIIEQISEFSKRVILADANLDKVLSAYNKHRDKPIREQAENIIHLFTLTNLGAPAAFKYFDTTIDRKRYTSTKEVLDATLIHQSITGLYETRIDLSQLGGDGGGGGEAAAKGGSGGTLNIEDEYRLHETSKGPDVPLGSTWLSDFPQAWAETGGMGLAFRQAPLIISLKATSTPVSIKQYPMSQEARLGIKPHIQRLLDQGILVPCQSPWNTPLLPVKKPGTNDYRPVQDLREVNKRVEDIHPTVPNPYNLLSGLPPSHQWYTVLDLKDAFFCLRLHPTSQSLFAFEWKDPEMGISGQLTWTRLPQGFKNSPTLFNEALHRDLADFRIQHPDLILLQYVDDLLLAATSELDCQQGTRALLQTLGDLGYRASAKKAQICQKQVKYLGYLLKEGQRWLTEARKETVMGQPTPKTPRQLREFLGKAGLCRLFIPGFAEMAAPLYPLTKPGTLFKWGPDQQKAYQEIKQALLTAPALGLPDLTKPFELFVDEKQGYAKGVLTQKLGPWRRPVAYLSKKLDPVAAGWPPCLRMVAAIAVLTKDVGKLTMGQPLVILAPHAVEALVKQPPDRWLSNARMTHYQALLLDTDRVQFGPIVALNPATLLPLPEEGLQHDCLDILAEAHGTRPDLTDQPLPDADHTWYTDGSSFLQEGQRRAGAAVTTETEVIWAKALPAGTSAQRAELIALTQALKMAAGKKLNVYTDSRYAFATAHIHGEIYRRRGWLTSEGKEIKNKDEILALLKALFLPKRLSIIHCPGHQKGNHAEARGNRMADQAAREVATRETPETSTLLAGKRTADGSEFEKRTADGSEFESPKKKAKVE

SEQ ID NO: 6930 - protein, 2096 aa, synthetic construct
MPAAKRVKLDGGDKKYSIGLDIGTNSVGWAVITDEYKVPSKKFKVLGNTDRHSIKKNLIGALLFDSGETAEATRLKRTARRRYTRRKNRICYLQEIFSNEMAKVDDSFFHRLEESFLVEEDKKHERHPIFGNIVDEVAYHEKYPTIYHLRKKLVDSTDKADLRLIYLALAHMIKFRGHFLIEGDLNPDNSDVDKLFIQLVQTYNQLFEENPINASGVDAKAILSARLSKSRRLENLIAQLPGEKKNGLFGNLIALSLGLTPNFKSNFDLAEDAKLQLSKDTYDDDLDNLLAQIGDQYADLFLAAKNLSDAILLSDILRVNTEITKAPLSASMIKRYDEHHQDLTLLKALVRQQLPEKYKEIFFDQSKNGYAGYIDGGASQEEFYKFIKPILEKMDGTEELLVKLNREDLLRKQRTFDNGSIPHQIHLGELHAILRRQEDFYPFLKDNREKIEKILTFRIPYYVGPLARGNSRFAWMTRKSEETITPWNFEEVVDKGASAQSFIERMTNFDKNLPNEKVLPKHSLLYEYFTVYNELTKVKYVTEGMRKPAFLSGEQKKAIVDLLFKTNRKVTVKQLKEDYFKKIECFDSVEISGVEDRFNASLGTYHDLLKIIKDKDFLDNEENEDILEDIVLTLTLFEDREMIEERLKTYAHLFDDKVMKQLKRRRYTGWGRLSRKLINGIRDKQSGKTILDFLKSDGFANRNFMQLIHDDSLTFKEDIQKAQVSGQGDSLHEHIANLAGSPAIKKGILQTVKVVDELVKVMGRHKPENIVIEMARENQTTQKGQKNSRERMKRIEEGIKELGSQILKEHPVENTQLQNEKLYLYYLQNGRDMYVDQELDINRLSDYDVDHIVPQSFLKDDSIDNKVLTRSDKARGKSDNVPSEEVVKKMKNYWRQLLNAKLITQRKFDNLTKAERGGLSELDKAGFIKRQLVETRQITKHVAQILDSRMNTKYDENDKLIREVKVITLKSKLVSDFRKDFQFYKVREINNYHHAHDAYLNAVVGTALIKKYPKLESEFVYGDYKVYDVRKMIAKSEQEIGKATAKYFFYSNIMNFFKTEITLANGEIRKRPLIETNGETGEIVWDKGRDFATVRKVLSMPQVNIVKKTEVQTGGFSKESILPKRNSDKLIARKKDWDPKKYGGFDSPTVAYSVLVVAKVEKGKSKKLKSVKELLGITIMERSSFEKNPIDFLEAKGYKEVKKDLIIKLPKYSLFELENGRKRMLASAGELQKGNELALPSKYVNFLYLASHYEKLKGSPEDNEQKQLFVEQHKHYLDEIIEQISEFSKRVILADANLDKVLSAYNKHRDKPIREQAENIIHLFTLTNLGAPAAFKYFDTTIDRKRYTSTKEVLDATLIHQSITGLYETRIDLSQLGGDGGGGGEAAAKGGSGGTLNIEDEYRLHETSKGPDVPLGSTWLSDFPQAWAETGGMGLAVRQAPLIIPLKATSTPVSIKQYPMSQEARLGIKPHIQRLLDQGILVPCQSPWNTPLLPVKKPGTNDYRPVQDLREVNKRVEDIHPTVPNPYNLLSGLPPSHQWYTVLDLKDAFFCLRLHPTSQSLFAFEWRDPEMGISGQLTWTRLPQGFKNSPTLFNEALHRDLADFRIQHPDLILLQYVDDLLLAATSELDCQQGTRALLQTLGDLGYRASAKKAQICQKQVKYLGYLLKEGQRWLTEARKETVMGQPTPKTPRQLREFLGTAGFCRLWIPGFAEMAAPLYPLTKPGTLFEWGPDQQKAYQEIKQALLTAPALGLPDLTKPFELFVDEKQGYAKGVLTQKLGPWRRPVAYLSKKLDPVAAGWPPCLRMVAAIAVLTKDAGKLTMGQPLVILAPHAVEALVKQPPDRWLSNARMTHYQALLLDTDRVQFGPIVALNPATLLPLPEEGLQHDCLDILAEAHGTRPDLTDQPLPDADHTWYTDGSSFLQEGQRKAGAAVTTETEVVWAKALPAGTSAQRAELIALTQALKMAEGKKLNVYTDSRYAFATAHIHGEIYRRRGWLTSEGKEIKNKDEILALLKALFLPKRLSIIHCPGHQKGNRAEARGNRMADQAAREVATRETPETSTLLAGKRTADGSEFEKRTADGSEFESPKKKAKVE

SEQ ID NO: 6931 - protein, 2090 aa, synthetic construct
MPAAKRVKLDGGDKKYSIGLDIGTNSVGWAVITDEYKVPSKKFKVLGNTDRHSIKKNLIGALLFDSGETAEATRLKRTARRRYTRRKNRICYLQEIFSNEMAKVDDSFFHRLEESFLVEEDKKHERHPIFGNIVDEVAYHEKYPTIYHLRKKLVDSTDKADLRLIYLALAHMIKFRGHFLIEGDLNPDNSDVDKLFIQLVQTYNQLFEENPINASGVDAKAILSARLSKSRRLENLIAQLPGEKKNGLFGNLIALSLGLTPNFKSNFDLAEDAKLQLSKDTYDDDLDNLLAQIGDQYADLFLAAKNLSDAILLSDILRVNTEITKAPLSASMIKRYDEHHQDLTLLKALVRQQLPEKYKEIFFDQSKNGYAGYIDGGASQEEFYKFIKPILEKMDGTEELLVKLNREDLLRKQRTFDNGSIPHQIHLGELHAILRRQEDFYPFLKDNREKIEKILTFRIPYYVGPLARGNSRFAWMTRKSEETITPWNFEEVVDKGASAQSFIERMTNFDKNLPNEKVLPKHSLLYEYFTVYNELTKVKYVTEGMRKPAFLSGEQKKAIVDLLFKTNRKVTVKQLKEDYFKKIECFDSVEISGVEDRFNASLGTYHDLLKIIKDKDFLDNEENEDILEDIVLTLTLFEDREMIEERLKTYAHLFDDKVMKQLKRRRYTGWGRLSRKLINGIRDKQSGKTILDFLKSDGFANRNFMQLIHDDSLTFKEDIQKAQVSGQGDSLHEHIANLAGSPAIKKGILQTVKVVDELVKVMGRHKPENIVIEMARENQTTQKGQKNSRERMKRIEEGIKELGSQILKEHPVENTQLQNEKLYLYYLQNGRDMYVDQELDINRLSDYDVDHIVPQSFLKDDSIDNKVLTRSDKARGKSDNVPSEEVVKKMKNYWRQLLNAKLITQRKFDNLTKAERGGLSELDKAGFIKRQLVETRQITKHVAQILDSRMNTKYDENDKLIREVKVITLKSKLVSDFRKDFQFYKVREINNYHHAHDAYLNAVVGTALIKKYPKLESEFVYGDYKVYDVRKMIAKSEQEIGKATAKYFFYSNIMNFFKTEITLANGEIRKRPLIETNGETGEIVWDKGRDFATVRKVLSMPQVNIVKKTEVQTGGFSKESILPKRNSDKLIARKKDWDPKKYGGFDSPTVAYSVLVVAKVEKGKSKKLKSVKELLGITIMERSSFEKNPIDFLEAKGYKEVKKDLIIKLPKYSLFELENGRKRMLASAGELQKGNELALPSKYVNFLYLASHYEKLKGSPEDNEQKQLFVEQHKHYLDEIIEQISEFSKRVILADANLDKVLSAYNKHRDKPIREQAENIIHLFTLTNLGAPAAFKYFDTTIDRKRYTSTKEVLDATLIHQSITGLYETRIDLSQLGGDGGGGGEAAAKGGSGGTLQLDDEYRLYSPLVKPDQNIQFWLEQFPQAWAETAGMGLAKQVPPQVIQLKASATPVSVRQYPLSKEAQEGIRPHVQRLIQQGILVPVQSPWNTPLLPVRKPGTNDYRPVQDLREVNKRVQDIHPTVPNPYNLLCALPPQRSWYTVLDLKDAFFCLRLHPTSQPLFAFEWRDPGTGRTGQLTWTRLPQGFKNSPTIFDEALHRDLANFRIQHPQVTLLQYVDDLLLAGATKQDCLEGTKALLLELSDLGYRASAKKAQICRREVTYLGYSLRDGQRWLTEARKKTVVQIPAPTTAKQVREFLGTAGFCRLWIPGFATLAAPLYPLTKEKGEFSWAPEHQKAFDAIKKALLSAPALALPDVTKPFTLYVDERKGVARGVLTQTLGPWRRPVAYLSKKLDPVASGWPVCLKAIAAVAILVKDADKLTLGQNITVIAPHALENIVRQPPDRWMTNARMTHYQSLLLTERVTFAPPAALNPATLLPEETDEPVTHDCHQLLIEETGVRKDLTDIPLTGEVLTWFTDGSSYVVEGKRMAGAAVVDGTRTIWASSLPEGTSAQKAELMALTQALRLAEGKSINIYTDSRYAFATAHVHGAIYKQRGLLTSAGREIKNKEEILSLLEALHLPKRLAIIHCPGHQKAKDPISRGNQMADRVAKQAAQGVNLLAGKRTADGSEFEKRTADGSEFESPKKKAKVE

SEQ ID NO: 6932 - protein, 2087 aa, synthetic construct
MPAAKRVKLDGGDKKYSIGLDIGTNSVGWAVITDEYKVPSKKFKVLGNTDRHSIKKNLIGALLFDSGETAEATRLKRTARRRYTRRKNRICYLQEIFSNEMAKVDDSFFHRLEESFLVEEDKKHERHPIFGNIVDEVAYHEKYPTIYHLRKKLVDSTDKADLRLIYLALAHMIKFRGHFLIEGDLNPDNSDVDKLFIQLVQTYNQLFEENPINASGVDAKAILSARLSKSRRLENLIAQLPGEKKNGLFGNLIALSLGLTPNFKSNFDLAEDAKLQLSKDTYDDDLDNLLAQIGDQYADLFLAAKNLSDAILLSDILRVNTEITKAPLSASMIKRYDEHHQDLTLLKALVRQQLPEKYKEIFFDQSKNGYAGYIDGGASQEEFYKFIKPILEKMDGTEELLVKLNREDLLRKQRTFDNGSIPHQIHLGELHAILRRQEDFYPFLKDNREKIEKILTFRIPYYVGPLARGNSRFAWMTRKSEETITPWNFEEVVDKGASAQSFIERMTNFDKNLPNEKVLPKHSLLYEYFTVYNELTKVKYVTEGMRKPAFLSGEQKKAIVDLLFKTNRKVTVKQLKEDYFKKIECFDSVEISGVEDRFNASLGTYHDLLKIIKDKDFLDNEENEDILEDIVLTLTLFEDREMIEERLKTYAHLFDDKVMKQLKRRRYTGWGRLSRKLINGIRDKQSGKTILDFLKSDGFANRNFMQLIHDDSLTFKEDIQKAQVSGQGDSLHEHIANLAGSPAIKKGILQTVKVVDELVKVMGRHKPENIVIEMARENQTTQKGQKNSRERMKRIEEGIKELGSQILKEHPVENTQLQNEKLYLYYLQNGRDMYVDQELDINRLSDYDVDHIVPQSFLKDDSIDNKVLTRSDKARGKSDNVPSEEVVKKMKNYWRQLLNAKLITQRKFDNLTKAERGGLSELDKAGFIKRQLVETRQITKHVAQILDSRMNTKYDENDKLIREVKVITLKSKLVSDFRKDFQFYKVREINNYHHAHDAYLNAVVGTALIKKYPKLESEFVYGDYKVYDVRKMIAKSEQEIGKATAKYFFYSNIMNFFKTEITLANGEIRKRPLIETNGETGEIVWDKGRDFATVRKVLSMPQVNIVKKTEVQTGGFSKESILPKRNSDKLIARKKDWDPKKYGGFDSPTVAYSVLVVAKVEKGKSKKLKSVKELLGITIMERSSFEKNPIDFLEAKGYKEVKKDLIIKLPKYSLFELENGRKRMLASAGELQKGNELALPSKYVNFLYLASHYEKLKGSPEDNEQKQLFVEQHKHYLDEIIEQISEFSKRVILADANLDKVLSAYNKHRDKPIREQAENIIHLFTLTNLGAPAAFKYFDTTIDRKRYTSTKEVLDATLIHQSITGLYETRIDLSQLGGDGGGGGEAAAKGGSGGIPWLMKKPLQLTTLVPLQEYEERLLKQTMLTGSYKEKLQSLFLKYDALWQHWENQVGHRRIKPHHIATGTVNPRPQKQYPINPKAKASIQTVINDLLKQGVLIQQNSIMNTPVYPVPKPDGKWRMVLDYREVNKTIPLIAAQNQHSAGILSSIFRGKYKTTLDLSNGFWAHSITPESYWLTAFTWLGQQYCWTRLPQGFLNSPALFNADVVDLLKEVPNVQVYVDDIYISHDDPREHLEQLEKVFSLLLNAGYVVSLKKSEIAQHEVEFLGFNITKEGRGLTETFKQKLLNITPPRDLKQLQSILGLLNFARNFIPNFSELVKPLYNIIATAPGKYITWTTDNSQQLQNIISMLNSAENLEERNPEVRLIMKVNTSPSAGYIRFYNEFAKRPIMYLNYVYTKAEVKFTNTEKLLTTIHKGLIKALDLGMGQEILVYSPIVSMTKIQKTPLPERKALPIRWITWMSYLEDPRIQFHYDKTLPELQQVPTVTDDIIAKIKHPSEFSMVFYTDGSAIKHPNVNKSHNAGMGIAQVQFKPEFTVINTWSIPLGDHTAQLAEVAAVEFACKKALKIDGPVLIVTDSFYVAESVNKELPYWQSNGFFNNKKKPLKHVSKWKSIADCIQLKPDIIIIHEKGHQPTASTFHTEGNNLADKLATQGSYVVNAGKRTADGSEFEKRTADGSEFESPKKKAKVE

SEQ ID NO: 6933 - protein, 2098 aa, synthetic construct
MPAAKRVKLDGGDKKYSIGLDIGTNSVGWAVITDEYKVPSKKFKVLGNTDRHSIKKNLIGALLFDSGETAEATRLKRTARRRYTRRKNRICYLQEIFSNEMAKVDDSFFHRLEESFLVEEDKKHERHPIFGNIVDEVAYHEKYPTIYHLRKKLVDSTDKADLRLIYLALAHMIKFRGHFLIEGDLNPDNSDVDKLFIQLVQTYNQLFEENPINASGVDAKAILSARLSKSRRLENLIAQLPGEKKNGLFGNLIALSLGLTPNFKSNFDLAEDAKLQLSKDTYDDDLDNLLAQIGDQYADLFLAAKNLSDAILLSDILRVNTEITKAPLSASMIKRYDEHHQDLTLLKALVRQQLPEKYKEIFFDQSKNGYAGYIDGGASQEEFYKFIKPILEKMDGTEELLVKLNREDLLRKQRTFDNGSIPHQIHLGELHAILRRQEDFYPFLKDNREKIEKILTFRIPYYVGPLARGNSRFAWMTRKSEETITPWNFEEVVDKGASAQSFIERMTNFDKNLPNEKVLPKHSLLYEYFTVYNELTKVKYVTEGMRKPAFLSGEQKKAIVDLLFKTNRKVTVKQLKEDYFKKIECFDSVEISGVEDRFNASLGTYHDLLKIIKDKDFLDNEENEDILEDIVLTLTLFEDREMIEERLKTYAHLFDDKVMKQLKRRRYTGWGRLSRKLINGIRDKQSGKTILDFLKSDGFANRNFMQLIHDDSLTFKEDIQKAQVSGQGDSLHEHIANLAGSPAIKKGILQTVKVVDELVKVMGRHKPENIVIEMARENQTTQKGQKNSRERMKRIEEGIKELGSQILKEHPVENTQLQNEKLYLYYLQNGRDMYVDQELDINRLSDYDVDHIVPQSFLKDDSIDNKVLTRSDKARGKSDNVPSEEVVKKMKNYWRQLLNAKLITQRKFDNLTKAERGGLSELDKAGFIKRQLVETRQITKHVAQILDSRMNTKYDENDKLIREVKVITLKSKLVSDFRKDFQFYKVREINNYHHAHDAYLNAVVGTALIKKYPKLESEFVYGDYKVYDVRKMIAKSEQEIGKATAKYFFYSNIMNFFKTEITLANGEIRKRPLIETNGETGEIVWDKGRDFATVRKVLSMPQVNIVKKTEVQTGGFSKESILPKRNSDKLIARKKDWDPKKYGGFDSPTVAYSVLVVAKVEKGKSKKLKSVKELLGITIMERSSFEKNPIDFLEAKGYKEVKKDLIIKLPKYSLFELENGRKRMLASAGELQKGNELALPSKYVNFLYLASHYEKLKGSPEDNEQKQLFVEQHKHYLDEIIEQISEFSKRVILADANLDKVLSAYNKHRDKPIREQAENIIHLFTLTNLGAPAAFKYFDTTIDRKRYTSTKEVLDATLIHQSITGLYETRIDLSQLGGDGGEAAAKGGSGGGGGTAPLEEEYRLFLEAPIQNVTLLEQWKREIPKVWAEINPPGLASTQAPIHVQLLSTALPVRVRQYPITLEAKRSLRETIRKFRAAGILRPVHSPWNTPLLPVRKSGTSEYRMVQDLREVNKRVETIHPTVPNPYTLLSLLPPDRIWYSVLDLKDAFFCIPLAPESQLIFAFEWADAEEGESGQLTWTRLPQGFKNSPTLFNEALNRDLQGFRLDHPSVSLLQYVDDLLIAADTQAACLSATRDLLMTLAELGYRVSGKKAQLCQEEVTYLGFKIHKGSRSLSNSRTQAILQIPVPKTKRQVREFLGTIGYCRLWIPGFAELAQPLYAATRPGNDPLVWGEKEEEAFQSLKLALTQPPALALPSLDKPFQLFVEETSGAAKGVLTQALGPWKRPVAYLSKRLDPVAAGWPRCLRAIAAAALLTREASKLTFGQDIEITSSHNLESLLRSPPDKWLTNARITQYQVLLLDPPRVRFKQTAALNPATLLPETDDTLPIHHCLDTLDSLTSTRPDLTDQPLAQAEATLFTDGSSYIRDGKRYAGAAVVTLDSVIWAEPLPIGTSAQKAELIALTKALEWSKDKSVNIYTDSRYAFATLHVHGMIYRERGWLTAGGKAIKNAPEILALLTAVWLPKRVAVMHCKGHQKDDAPTSTGNRRADEVAREVAIRPLSTQATISAGKRTADGSEFEKRTADGSEFESPKKKAKVE

SEQ ID NO: 6934 - protein, 2102 aa, synthetic construct
MPAAKRVKLDGGDKKYSIGLDIGTNSVGWAVITDEYKVPSKKFKVLGNTDRHSIKKNLIGALLFDSGETAEATRLKRTARRRYTRRKNRICYLQEIFSNEMAKVDDSFFHRLEESFLVEEDKKHERHPIFGNIVDEVAYHEKYPTIYHLRKKLVDSTDKADLRLIYLALAHMIKFRGHFLIEGDLNPDNSDVDKLFIQLVQTYNQLFEENPINASGVDAKAILSARLSKSRRLENLIAQLPGEKKNGLFGNLIALSLGLTPNFKSNFDLAEDAKLQLSKDTYDDDLDNLLAQIGDQYADLFLAAKNLSDAILLSDILRVNTEITKAPLSASMIKRYDEHHQDLTLLKALVRQQLPEKYKEIFFDQSKNGYAGYIDGGASQEEFYKFIKPILEKMDGTEELLVKLNREDLLRKQRTFDNGSIPHQIHLGELHAILRRQEDFYPFLKDNREKIEKILTFRIPYYVGPLARGNSRFAWMTRKSEETITPWNFEEVVDKGASAQSFIERMTNFDKNLPNEKVLPKHSLLYEYFTVYNELTKVKYVTEGMRKPAFLSGEQKKAIVDLLFKTNRKVTVKQLKEDYFKKIECFDSVEISGVEDRFNASLGTYHDLLKIIKDKDFLDNEENEDILEDIVLTLTLFEDREMIEERLKTYAHLFDDKVMKQLKRRRYTGWGRLSRKLINGIRDKQSGKTILDFLKSDGFANRNFMQLIHDDSLTFKEDIQKAQVSGQGDSLHEHIANLAGSPAIKKGILQTVKVVDELVKVMGRHKPENIVIEMARENQTTQKGQKNSRERMKRIEEGIKELGSQILKEHPVENTQLQNEKLYLYYLQNGRDMYVDQELDINRLSDYDVDHIVPQSFLKDDSIDNKVLTRSDKARGKSDNVPSEEVVKKMKNYWRQLLNAKLITQRKFDNLTKAERGGLSELDKAGFIKRQLVETRQITKHVAQILDSRMNTKYDENDKLIREVKVITLKSKLVSDFRKDFQFYKVREINNYHHAHDAYLNAVVGTALIKKYPKLESEFVYGDYKVYDVRKMIAKSEQEIGKATAKYFFYSNIMNFFKTEITLANGEIRKRPLIETNGETGEIVWDKGRDFATVRKVLSMPQVNIVKKTEVQTGGFSKESILPKRNSDKLIARKKDWDPKKYGGFDSPTVAYSVLVVAKVEKGKSKKLKSVKELLGITIMERSSFEKNPIDFLEAKGYKEVKKDLIIKLPKYSLFELENGRKRMLASAGELQKGNELALPSKYVNFLYLASHYEKLKGSPEDNEQKQLFVEQHKHYLDEIIEQISEFSKRVILADANLDKVLSAYNKHRDKPIREQAENIIHLFTLTNLGAPAAFKYFDTTIDRKRYTSTKEVLDATLIHQSITGLYETRIDLSQLGGDGGEAAAKGGSGGGGGTVSLQDEHRLFDIPVTTSLPDVWLQDFPQAWAETGGLGRAKCQAPIIIDLKPTAVPVSIKQYPMSLEAHMGIRQHIIKFLELGVLRPCRSPWNTPLLPVKKPGTQDYRPVQDLREINKRTVDIHPTVPNPYNLLSTLKPDYSWYTVLDLKDAFFCLPLAPQSQELFAFEWKDPERGISGQLTWTRLPQGFKNSPTLFDEALHRDLTDFRTQHPEVTLLQYVDDLLLAAPTKKACTQGTRHLLQELGEKGYRASAKKAQICQTKVTYLGYILSEGKRWLTPGRIETVARIPPPRNPREVREFLGTAGFCRLWIPGFAELAAPLYALTKESTPFTWQTEHQLAFEALKKALLSAPALGLPDTSKPFTLFLDERQGIAKGVLTQKLGPWKRPVAYLSKKLDPVAAGWPPCLRIMAATAMLVKDSAKLTLGQPLTVITPHTLEAIVRQPPDRWITNARLTHYQALLLDTDRVQFGPPVTLNPATLLPVPENQPSPHDCRQVLAETHGTREDLKDQELPDADHTWYTDGSSYLDSGTRRAGAAVVDGHNTIWAQSLPPGTSAQKAELIALTKALELSKGKKANIYTDSRYAFATAHTHGSIYERRGLLTSEGKEIKNKAEIIALLKALFLPQEVAIIHCPGHQKGQDPVAVGNRQADRVARQAAMAEVLTLATEPDNTSHITAGKRTADGSEFEKRTADGSEFESPKKKAKVE

SEQ ID NO: 6935 - protein, 2102 aa, synthetic construct
MPAAKRVKLDGGDKKYSIGLDIGTNSVGWAVITDEYKVPSKKFKVLGNTDRHSIKKNLIGALLFDSGETAEATRLKRTARRRYTRRKNRICYLQEIFSNEMAKVDDSFFHRLEESFLVEEDKKHERHPIFGNIVDEVAYHEKYPTIYHLRKKLVDSTDKADLRLIYLALAHMIKFRGHFLIEGDLNPDNSDVDKLFIQLVQTYNQLFEENPINASGVDAKAILSARLSKSRRLENLIAQLPGEKKNGLFGNLIALSLGLTPNFKSNFDLAEDAKLQLSKDTYDDDLDNLLAQIGDQYADLFLAAKNLSDAILLSDILRVNTEITKAPLSASMIKRYDEHHQDLTLLKALVRQQLPEKYKEIFFDQSKNGYAGYIDGGASQEEFYKFIKPILEKMDGTEELLVKLNREDLLRKQRTFDNGSIPHQIHLGELHAILRRQEDFYPFLKDNREKIEKILTFRIPYYVGPLARGNSRFAWMTRKSEETITPWNFEEVVDKGASAQSFIERMTNFDKNLPNEKVLPKHSLLYEYFTVYNELTKVKYVTEGMRKPAFLSGEQKKAIVDLLFKTNRKVTVKQLKEDYFKKIECFDSVEISGVEDRFNASLGTYHDLLKIIKDKDFLDNEENEDILEDIVLTLTLFEDREMIEERLKTYAHLFDDKVMKQLKRRRYTGWGRLSRKLINGIRDKQSGKTILDFLKSDGFANRNFMQLIHDDSLTFKEDIQKAQVSGQGDSLHEHIANLAGSPAIKKGILQTVKVVDELVKVMGRHKPENIVIEMARENQTTQKGQKNSRERMKRIEEGIKELGSQILKEHPVENTQLQNEKLYLYYLQNGRDMYVDQELDINRLSDYDVDHIVPQSFLKDDSIDNKVLTRSDKARGKSDNVPSEEVVKKMKNYWRQLLNAKLITQRKFDNLTKAERGGLSELDKAGFIKRQLVETRQITKHVAQILDSRMNTKYDENDKLIREVKVITLKSKLVSDFRKDFQFYKVREINNYHHAHDAYLNAVVGTALIKKYPKLESEFVYGDYKVYDVRKMIAKSEQEIGKATAKYFFYSNIMNFFKTEITLANGEIRKRPLIETNGETGEIVWDKGRDFATVRKVLSMPQVNIVKKTEVQTGGFSKESILPKRNSDKLIARKKDWDPKKYGGFDSPTVAYSVLVVAKVEKGKSKKLKSVKELLGITIMERSSFEKNPIDFLEAKGYKEVKKDLIIKLPKYSLFELENGRKRMLASAGELQKGNELALPSKYVNFLYLASHYEKLKGSPEDNEQKQLFVEQHKHYLDEIIEQISEFSKRVILADANLDKVLSAYNKHRDKPIREQAENIIHLFTLTNLGAPAAFKYFDTTIDRKRYTSTKEVLDATLIHQSITGLYETRIDLSQLGGDGGEAAAKGGSGGGGGTVSLQDEHRLFDIPVTTSLPDVWLQDFPQAWAETGGLGRAKCQAPIIIDLKPTAVPVSIKQYPMSLEAHMGIRQHIIKFLELGVLRPCRSPWNTPLLPVKKPGTQDYRPVQDLREINKRTVDIHPTVPNPYNLLSTLKPDYSWYTVLDLKDAFFCLPLAPQSQELFAFEWKDPERGISGQLTWTRLPQGFKNSPTLFNEALHRDLTDFRTQHPEVTLLQYVDDLLLAAPTKKACTQGTRHLLQELGEKGYRASAKKAQICQTKVTYLGYILSEGKRWLTPGRIETVARIPPPRNPREVREFLGTAGFCRLWIPGFAELAAPLYALTKPSTPFTWQTEHQLAFEALKKALLSAPALGLPDTSKPFTLFLDERQGIAKGVLTQKLGPWKRPVAYLSKKLDPVAAGWPPCLRIMAATAMLVKDSAKLTLGQPLTVITPHTLEAIVRQPPDRWITNARLTHYQALLLDTDRVQFGPPVTLNPATLLPVPENQPSPHDCRQVLAETHGTREDLKDQELPDADHTWYTDGSSYLDSGTRRAGAAVVDGHNTIWAQSLPPGTSAQKAELIALTKALELSKGKKANIYTDSRYAFATAHTHGSIYERRGWLTSEGKEIKNKAEIIALLKALFLPQEVAIIHCPGHQKGQDPVAVGNRQADRVARQAAMAEVLTLATEPDNTSHITAGKRTADGSEFEKRTADGSEFESPKKKAKVE

SEQ ID NO: 6936 - protein, 2087 aa, synthetic construct
MPAAKRVKLDGGDKKYSIGLDIGTNSVGWAVITDEYKVPSKKFKVLGNTDRHSIKKNLIGALLFDSGETAEATRLKRTARRRYTRRKNRICYLQEIFSNEMAKVDDSFFHRLEESFLVEEDKKHERHPIFGNIVDEVAYHEKYPTIYHLRKKLVDSTDKADLRLIYLALAHMIKFRGHFLIEGDLNPDNSDVDKLFIQLVQTYNQLFEENPINASGVDAKAILSARLSKSRRLENLIAQLPGEKKNGLFGNLIALSLGLTPNFKSNFDLAEDAKLQLSKDTYDDDLDNLLAQIGDQYADLFLAAKNLSDAILLSDILRVNTEITKAPLSASMIKRYDEHHQDLTLLKALVRQQLPEKYKEIFFDQSKNGYAGYIDGGASQEEFYKFIKPILEKMDGTEELLVKLNREDLLRKQRTFDNGSIPHQIHLGELHAILRRQEDFYPFLKDNREKIEKILTFRIPYYVGPLARGNSRFAWMTRKSEETITPWNFEEVVDKGASAQSFIERMTNFDKNLPNEKVLPKHSLLYEYFTVYNELTKVKYVTEGMRKPAFLSGEQKKAIVDLLFKTNRKVTVKQLKEDYFKKIECFDSVEISGVEDRFNASLGTYHDLLKIIKDKDFLDNEENEDILEDIVLTLTLFEDREMIEERLKTYAHLFDDKVMKQLKRRRYTGWGRLSRKLINGIRDKQSGKTILDFLKSDGFANRNFMQLIHDDSLTFKEDIQKAQVSGQGDSLHEHIANLAGSPAIKKGILQTVKVVDELVKVMGRHKPENIVIEMARENQTTQKGQKNSRERMKRIEEGIKELGSQILKEHPVENTQLQNEKLYLYYLQNGRDMYVDQELDINRLSDYDVDHIVPQSFLKDDSIDNKVLTRSDKARGKSDNVPSEEVVKKMKNYWRQLLNAKLITQRKFDNLTKAERGGLSELDKAGFIKRQLVETRQITKHVAQILDSRMNTKYDENDKLIREVKVITLKSKLVSDFRKDFQFYKVREINNYHHAHDAYLNAVVGTALIKKYPKLESEFVYGDYKVYDVRKMIAKSEQEIGKATAKYFFYSNIMNFFKTEITLANGEIRKRPLIETNGETGEIVWDKGRDFATVRKVLSMPQVNIVKKTEVQTGGFSKESILPKRNSDKLIARKKDWDPKKYGGFDSPTVAYSVLVVAKVEKGKSKKLKSVKELLGITIMERSSFEKNPIDFLEAKGYKEVKKDLIIKLPKYSLFELENGRKRMLASAGELQKGNELALPSKYVNFLYLASHYEKLKGSPEDNEQKQLFVEQHKHYLDEIIEQISEFSKRVILADANLDKVLSAYNKHRDKPIREQAENIIHLFTLTNLGAPAAFKYFDTTIDRKRYTSTKEVLDATLIHQSITGLYETRIDLSQLGGDGGEAAAKGGSGGGGGVPWILKKPLELTIKLDLEEQQGTLLNNSILSKKGKEELKQLFEKYSALWQSWENQVGHRRIRPHKIATGTVKPTPQKQYHINPKAKPDIQIVINDLLKQGVLIQKESTMNTPVYPVPKPNGRWRMVLDYRAVNKVTPLIAVQNQHSYGILGSLFKGRYKTTIDLSNGFWAHPIVPEDYWITAFTWQGKQYCWTVLPQGFLNSPGLFTGDVVDLLQGIPNVEVYVDDVYISHDSEKEHLEYLDILFNRLKEAGYIISLKKSNIANSIVDFLGFQITNEGRGLTDTFKEKLENITAPTTLKQLQSILGLLNFARNFIPDFTELIAPLYALIPKSTKNYVPWQIEHSTTLETLITKLNGAEYLQGRKGDKTLIMKVNASYTTGYIRYYNEGEKKPISYVSIVFSKTELKFTELEKLLTTVHKGLLKALDLSMGQNIHVYSPIVSMQNIQKTPQTAKKALASRWLSWLSYLEDPRIRFFYDPQMPALKDLPAVDTGKDNKKHPSNFQHIFYTDGSAITSPTKEGHLNAGMGIVYFINKDGNLQKQQEWSISLGNHTAQFAEIAAFEFALKKCLPLGGNILVVTDSNYVAKAYNEELDVWASNGFVNNRKKPLKHISKWKSVADLKRLRPDVVVTHEPGHQKLDSSPHAYGNNLADQLATQASFKVHAGKRTADGSEFEKRTADGSEFESPKKKAKVE

SEQ ID NO: 6937 - protein, 2173 aa, synthetic construct
MPAAKRVKLDGGDKKYSIGLDIGTNSVGWAVITDEYKVPSKKFKVLGNTDRHSIKKNLIGALLFDSGETAEATRLKRTARRRYTRRKNRICYLQEIFSNEMAKVDDSFFHRLEESFLVEEDKKHERHPIFGNIVDEVAYHEKYPTIYHLRKKLVDSTDKADLRLIYLALAHMIKFRGHFLIEGDLNPDNSDVDKLFIQLVQTYNQLFEENPINASGVDAKAILSARLSKSRRLENLIAQLPGEKKNGLFGNLIALSLGLTPNFKSNFDLAEDAKLQLSKDTYDDDLDNLLAQIGDQYADLFLAAKNLSDAILLSDILRVNTEITKAPLSASMIKRYDEHHQDLTLLKALVRQQLPEKYKEIFFDQSKNGYAGYIDGGASQEEFYKFIKPILEKMDGTEELLVKLNREDLLRKQRTFDNGSIPHQIHLGELHAILRRQEDFYPFLKDNREKIEKILTFRIPYYVGPLARGNSRFAWMTRKSEETITPWNFEEVVDKGASAQSFIERMTNFDKNLPNEKVLPKHSLLYEYFTVYNELTKVKYVTEGMRKPAFLSGEQKKAIVDLLFKTNRKVTVKQLKEDYFKKIECFDSVEISGVEDRFNASLGTYHDLLKIIKDKDFLDNEENEDILEDIVLTLTLFEDREMIEERLKTYAHLFDDKVMKQLKRRRYTGWGRLSRKLINGIRDKQSGKTILDFLKSDGFANRNFMQLIHDDSLTFKEDIQKAQVSGQGDSLHEHIANLAGSPAIKKGILQTVKVVDELVKVMGRHKPENIVIEMARENQTTQKGQKNSRERMKRIEEGIKELGSQILKEHPVENTQLQNEKLYLYYLQNGRDMYVDQELDINRLSDYDVDHIVPQSFLKDDSIDNKVLTRSDKARGKSDNVPSEEVVKKMKNYWRQLLNAKLITQRKFDNLTKAERGGLSELDKAGFIKRQLVETRQITKHVAQILDSRMNTKYDENDKLIREVKVITLKSKLVSDFRKDFQFYKVREINNYHHAHDAYLNAVVGTALIKKYPKLESEFVYGDYKVYDVRKMIAKSEQEIGKATAKYFFYSNIMNFFKTEITLANGEIRKRPLIETNGETGEIVWDKGRDFATVRKVLSMPQVNIVKKTEVQTGGFSKESILPKRNSDKLIARKKDWDPKKYGGFDSPTVAYSVLVVAKVEKGKSKKLKSVKELLGITIMERSSFEKNPIDFLEAKGYKEVKKDLIIKLPKYSLFELENGRKRMLASAGELQKGNELALPSKYVNFLYLASHYEKLKGSPEDNEQKQLFVEQHKHYLDEIIEQISEFSKRVILADANLDKVLSAYNKHRDKPIREQAENIIHLFTLTNLGAPAAFKYFDTTIDRKRYTSTKEVLDATLIHQSITGLYETRIDLSQLGGDGGEAAAKGGSGGGGGMDLLKPLTVERKGVKIKGYWNSQADITCVPKDLLQGEEPVRQQNVTTIHGTQEGDVYYVNLKIDGRRINTEVIGTTLDYAIITPGDVPWILKKPLELTIKLDLEEQQGTLLNNSILSKKGKEELKQLFEKYSALWQSWENQVGHRRIRPHKIATGTVKPTPQKQYHINPKAKPDIQIVINDLLKQGVLIQKESTMNTPVYPVPKPNGRWRMVLDYRAVNKVTPLIAVQNQHSYGILGSLFKGRYKTTIDLSNGFWAHPIVPEDYWITAFTWQGKQYCWTVLPQGFLNSPGLFNGDVVDLLQGIPNVEVYVDDVYISHDSEKEHLEYLDILFNRLKEAGYIISLKKSNIANSIVDFLGFQITNEGRGLTDTFKEKLENITAPTTLKQLQSILGKLNFARNFIPDFTELIAPLYALIPKSPKNYVPWQIEHSTTLETLITKLNGAEYLQGRKGDKTLIMKVNASYTTGYIRYYNEGEKKPISYVSIVFSKTELKFTELEKLLTTVHKGLLKALDLSMGQNIHVYSPIVSMQNIQKTPQTAKKALASRWLSWLSYLEDPRIRFFYDPQMPALKDLPAVDTGKDNKKHPSNFQHIFYTDGSAITSPTKEGHLNAGMGIVYFINKDGNLQKQQEWSISLGNHTAQFAEIAAFEFALKKCLPLGGNILVVTDSNYVAKAYNEELDVWASNGFVNNRKKPLKHISKWKSVADLKRLRPDVVVTHEPGHQKLDSSPHAYGNNLADQLATQASFKVHAGKRTADGSEFEKRTADGSEFESPKKKAKVE

SEQ ID NO: 6938 - protein, 2095 aa, synthetic construct
MPAAKRVKLDGGDKKYSIGLDIGTNSVGWAVITDEYKVPSKKFKVLGNTDRHSIKKNLIGALLFDSGETAEATRLKRTARRRYTRRKNRICYLQEIFSNEMAKVDDSFFHRLEESFLVEEDKKHERHPIFGNIVDEVAYHEKYPTIYHLRKKLVDSTDKADLRLIYLALAHMIKFRGHFLIEGDLNPDNSDVDKLFIQLVQTYNQLFEENPINASGVDAKAILSARLSKSRRLENLIAQLPGEKKNGLFGNLIALSLGLTPNFKSNFDLAEDAKLQLSKDTYDDDLDNLLAQIGDQYADLFLAAKNLSDAILLSDILRVNTEITKAPLSASMIKRYDEHHQDLTLLKALVRQQLPEKYKEIFFDQSKNGYAGYIDGGASQEEFYKFIKPILEKMDGTEELLVKLNREDLLRKQRTFDNGSIPHQIHLGELHAILRRQEDFYPFLKDNREKIEKILTFRIPYYVGPLARGNSRFAWMTRKSEETITPWNFEEVVDKGASAQSFIERMTNFDKNLPNEKVLPKHSLLYEYFTVYNELTKVKYVTEGMRKPAFLSGEQKKAIVDLLFKTNRKVTVKQLKEDYFKKIECFDSVEISGVEDRFNASLGTYHDLLKIIKDKDFLDNEENEDILEDIVLTLTLFEDREMIEERLKTYAHLFDDKVMKQLKRRRYTGWGRLSRKLINGIRDKQSGKTILDFLKSDGFANRNFMQLIHDDSLTFKEDIQKAQVSGQGDSLHEHIANLAGSPAIKKGILQTVKVVDELVKVMGRHKPENIVIEMARENQTTQKGQKNSRERMKRIEEGIKELGSQILKEHPVENTQLQNEKLYLYYLQNGRDMYVDQELDINRLSDYDVDHIVPQSFLKDDSIDNKVLTRSDKARGKSDNVPSEEVVKKMKNYWRQLLNAKLITQRKFDNLTKAERGGLSELDKAGFIKRQLVETRQITKHVAQILDSRMNTKYDENDKLIREVKVITLKSKLVSDFRKDFQFYKVREINNYHHAHDAYLNAVVGTALIKKYPKLESEFVYGDYKVYDVRKMIAKSEQEIGKATAKYFFYSNIMNFFKTEITLANGEIRKRPLIETNGETGEIVWDKGRDFATVRKVLSMPQVNIVKKTEVQTGGFSKESILPKRNSDKLIARKKDWDPKKYGGFDSPTVAYSVLVVAKVEKGKSKKLKSVKELLGITIMERSSFEKNPIDFLEAKGYKEVKKDLIIKLPKYSLFELENGRKRMLASAGELQKGNELALPSKYVNFLYLASHYEKLKGSPEDNEQKQLFVEQHKHYLDEIIEQISEFSKRVILADANLDKVLSAYNKHRDKPIREQAENIIHLFTLTNLGAPAAFKYFDTTIDRKRYTSTKEVLDATLIHQSITGLYETRIDLSQLGGDGGEAAAKGGSGGGGGTLQLEEEYRLFEPESTQKQEMDIWLKNFPQAWAETGGMGTAHCQAPVLIQLKATATPISIRQYPMPHEAYQGIKPHIRRMLDQGILKPCQSPWNTPLLPVKKPGTEDYRPVQDLREVNKRVEDIHPTVPNPYNLLSTLPPSHPWYTVLDLKDAFFCLRLHSESQLLFAFEWRDPEIGLSGQLTWTRLPQGFKNSPTLFNEALHSDLADFRVRYPALVLLQYVDDLLLAAATRTECLEGTKALLETLGNKGYRASAKKAQICLQEVTYLGYSLKDGQRWLTKARKEAILSIPVPKNSRQVREFLGTAGYCRLWIPGFAELAAPLYPLTRPGTLFQWGTEQQLAFEDIKKALLSSPALGLPDITKPFELFIDENSGFAKGVLVQKLGPWKRPVAYLSKKLDTVASGWPPCLRMVAAIAILVKDAGKLTLGQPLTILTSHPVEALVRQPPNKWLSNARMTHYQAMLLDAERVHFGPTVSLNPATLLPLPSGGNHHDCLQILAETHGTRPDLTDQPLPDADLTWYTDGSSFIRNGEREAGAAVTTESEVIWAAPLPPGTSAQRAELIALTQALKMAEGKKLTVYTDSRYAFATTHVHGEIYRRRGWLTSEGKEIKNKNEILALLEALFLPKRLSIIHCPGHQKGDSPQAKGNRLADDTAKKAATETHSSLTVLPAGKRTADGSEFEKRTADGSEFESPKKKAKVE

SEQ ID NO: 6939 - protein, 2176 aa, synthetic construct
MPAAKRVKLDGGDKKYSIGLDIGTNSVGWAVITDEYKVPSKKFKVLGNTDRHSIKKNLIGALLFDSGETAEATRLKRTARRRYTRRKNRICYLQEIFSNEMAKVDDSFFHRLEESFLVEEDKKHERHPIFGNIVDEVAYHEKYPTIYHLRKKLVDSTDKADLRLIYLALAHMIKFRGHFLIEGDLNPDNSDVDKLFIQLVQTYNQLFEENPINASGVDAKAILSARLSKSRRLENLIAQLPGEKKNGLFGNLIALSLGLTPNFKSNFDLAEDAKLQLSKDTYDDDLDNLLAQIGDQYADLFLAAKNLSDAILLSDILRVNTEITKAPLSASMIKRYDEHHQDLTLLKALVRQQLPEKYKEIFFDQSKNGYAGYIDGGASQEEFYKFIKPILEKMDGTEELLVKLNREDLLRKQRTFDNGSIPHQIHLGELHAILRRQEDFYPFLKDNREKIEKILTFRIPYYVGPLARGNSRFAWMTRKSEETITPWNFEEVVDKGASAQSFIERMTNFDKNLPNEKVLPKHSLLYEYFTVYNELTKVKYVTEGMRKPAFLSGEQKKAIVDLLFKTNRKVTVKQLKEDYFKKIECFDSVEISGVEDRFNASLGTYHDLLKIIKDKDFLDNEENEDILEDIVLTLTLFEDREMIEERLKTYAHLFDDKVMKQLKRRRYTGWGRLSRKLINGIRDKQSGKTILDFLKSDGFANRNFMQLIHDDSLTFKEDIQKAQVSGQGDSLHEHIANLAGSPAIKKGILQTVKVVDELVKVMGRHKPENIVIEMARENQTTQKGQKNSRERMKRIEEGIKELGSQILKEHPVENTQLQNEKLYLYYLQNGRDMYVDQELDINRLSDYDVDHIVPQSFLKDDSIDNKVLTRSDKARGKSDNVPSEEVVKKMKNYWRQLLNAKLITQRKFDNLTKAERGGLSELDKAGFIKRQLVETRQITKHVAQILDSRMNTKYDENDKLIREVKVITLKSKLVSDFRKDFQFYKVREINNYHHAHDAYLNAVVGTALIKKYPKLESEFVYGDYKVYDVRKMIAKSEQEIGKATAKYFFYSNIMNFFKTEITLANGEIRKRPLIETNGETGEIVWDKGRDFATVRKVLSMPQVNIVKKTEVQTGGFSKESILPKRNSDKLIARKKDWDPKKYGGFDSPTVAYSVLVVAKVEKGKSKKLKSVKELLGITIMERSSFEKNPIDFLEAKGYKEVKKDLIIKLPKYSLFELENGRKRMLASAGELQKGNELALPSKYVNFLYLASHYEKLKGSPEDNEQKQLFVEQHKHYLDEIIEQISEFSKRVILADANLDKVLSAYNKHRDKPIREQAENIIHLFTLTNLGAPAAFKYFDTTIDRKRYTSTKEVLDATLIHQSITGLYETRIDLSQLGGDGGEAAAKGGSGGGGGMNPLQLLQPLPAEIKGTKLLAHWNSGATITCIPESFLEDEQPIKKTLIKTIHGEKQQNVYYVTFKVKGRKVEAEVIASPYEYILLSPTDVPWLTQQPLQLTILVPLQEYQEKILSKTALPEDQKQQLKTLFVKYDNLWQHWENQVGHRKIRPHNIATGDYPPRPQKQYPINPKAKPSIQIVIDDLLKQGVLTPQNSTMNTPVYPVPKPDGRWRMVLDYREVNKTIPLTAAQNQHSAGILATIVRQKYKTTLDLANGFWAHPITPESYWLTAFTWQGKQYCWTRLPQGFLNSPALFNADVVDLLKEIPNVQVYVDDIYLSHDDPKEHVQQLEKVFQILLQAGYVVSLKKSEIGQKTVEFLGFNITKEGRGLTDTFKTKLLNITPPKDLKQLQSILGKLNFARNFIPNFAELVQPLYNLIAPAKGKYIEWSEENTKQLNMVIEALNTASNLEERLPEQRLVIKVNTSPSAGYVRYYNETGKKPIMYLNYVFSKAELKFSMLEKLLTTMHKALIKAMDLAMGQEILVYSPIVSMTKIQKTPLPERKALPIRWITWMTYLEDPRIQFHYDKTLPELKHIPDVYTSSQSPVKHPSQYEGVFYTDGSAIKSPDPTKSNNAGMGIVHATYKPEYQVLNQWSIPLGNHTAQMAEIAAVEFACKKALKIPGPVLVITDSFYVAESANKELPYWKSNGFVNNKKKPLKHISKWKSIAECLSMKPDITIQHEKGISLQIPVFILKGNALADKLATQGSYVVNAGKRTADGSEFEKRTADGSEFESPKKKAKVE

SEQ ID NO: 6940 - protein, 2094 aa, synthetic construct
MPAAKRVKLDGGDKKYSIGLDIGTNSVGWAVITDEYKVPSKKFKVLGNTDRHSIKKNLIGALLFDSGETAEATRLKRTARRRYTRRKNRICYLQEIFSNEMAKVDDSFFHRLEESFLVEEDKKHERHPIFGNIVDEVAYHEKYPTIYHLRKKLVDSTDKADLRLIYLALAHMIKFRGHFLIEGDLNPDNSDVDKLFIQLVQTYNQLFEENPINASGVDAKAILSARLSKSRRLENLIAQLPGEKKNGLFGNLIALSLGLTPNFKSNFDLAEDAKLQLSKDTYDDDLDNLLAQIGDQYADLFLAAKNLSDAILLSDILRVNTEITKAPLSASMIKRYDEHHQDLTLLKALVRQQLPEKYKEIFFDQSKNGYAGYIDGGASQEEFYKFIKPILEKMDGTEELLVKLNREDLLRKQRTFDNGSIPHQIHLGELHAILRRQEDFYPFLKDNREKIEKILTFRIPYYVGPLARGNSRFAWMTRKSEETITPWNFEEVVDKGASAQSFIERMTNFDKNLPNEKVLPKHSLLYEYFTVYNELTKVKYVTEGMRKPAFLSGEQKKAIVDLLFKTNRKVTVKQLKEDYFKKIECFDSVEISGVEDRFNASLGTYHDLLKIIKDKDFLDNEENEDILEDIVLTLTLFEDREMIEERLKTYAHLFDDKVMKQLKRRRYTGWGRLSRKLINGIRDKQSGKTILDFLKSDGFANRNFMQLIHDDSLTFKEDIQKAQVSGQGDSLHEHIANLAGSPAIKKGILQTVKVVDELVKVMGRHKPENIVIEMARENQTTQKGQKNSRERMKRIEEGIKELGSQILKEHPVENTQLQNEKLYLYYLQNGRDMYVDQELDINRLSDYDVDHIVPQSFLKDDSIDNKVLTRSDKARGKSDNVPSEEVVKKMKNYWRQLLNAKLITQRKFDNLTKAERGGLSELDKAGFIKRQLVETRQITKHVAQILDSRMNTKYDENDKLIREVKVITLKSKLVSDFRKDFQFYKVREINNYHHAHDAYLNAVVGTALIKKYPKLESEFVYGDYKVYDVRKMIAKSEQEIGKATAKYFFYSNIMNFFKTEITLANGEIRKRPLIETNGETGEIVWDKGRDFATVRKVLSMPQVNIVKKTEVQTGGFSKESILPKRNSDKLIARKKDWDPKKYGGFDSPTVAYSVLVVAKVEKGKSKKLKSVKELLGITIMERSSFEKNPIDFLEAKGYKEVKKDLIIKLPKYSLFELENGRKRMLASAGELQKGNELALPSKYVNFLYLASHYEKLKGSPEDNEQKQLFVEQHKHYLDEIIEQISEFSKRVILADANLDKVLSAYNKHRDKPIREQAENIIHLFTLTNLGAPAAFKYFDTTIDRKRYTSTKEVLDATLIHQSITGLYETRIDLSQLGGDGGEAAAKGGSGGGGGVLNLEEEYRLHEKPVPSSIDPSWLQLFPTVWAERAGMGLANQVPPVVVELRSGASPVAVRQYPMSKEAREGIRPHIQKFLDLGVLVPCRSPWNTPLLPVKKPGTNDYRPVQDLREINKRVQDIHPTVPNPYNLLSSLPPSYTWYSVLDLKDAFFCLRLHPNSQPLFAFEWKDPEKGNTGQLTWTRLPQGFKNSPTLFNEALHRDLAPFRALNPQVVLLQYVDDLLVAAPTYEDCKKGTQKLLQELSKLGYRVSAKKAQLCQREVTYLGYLLKEGKRWLTPARKATVMKIPVPTTPRQVREFLGKAGFCRLFIPGFASLAAPLYPLTKPSIPFIWTEEHQQAFDHIKKALLSAPALALPDLTKPFTLYIDERAGVARGVLTQTLGPWRRPVAYLSKKLDPVASGWPTCLKAVAAVALLLKDADKLTLGQNVTVIASHSLESIVRQPPDRWMTNARMTHYQSLLLNERVSFAPPAVLNPATLLPVESEATPVHRCSEILAEETGTRRDLEDQPLPGVPTWYTDGSSFITEGKRRAGAPIVDGKRTVWASSLPEGTSAQKAELVALTQALRLAEGKNINIYTDSRYAFATAHIHGAIYKQRGWLTSAGKDIKNKEEILALLEAIHLPRRVAIIHCPGHQRGSNPVATGNRRADEAAKQAALSTRVLAGTTKPAGKRTADGSEFEKRTADGSEFESPKKKAKVE

SEQ ID NO: 6941 - protein, 2218 aa, synthetic construct
MPAAKRVKLDGGDKKYSIGLDIGTNSVGWAVITDEYKVPSKKFKVLGNTDRHSIKKNLIGALLFDSGETAEATRLKRTARRRYTRRKNRICYLQEIFSNEMAKVDDSFFHRLEESFLVEEDKKHERHPIFGNIVDEVAYHEKYPTIYHLRKKLVDSTDKADLRLIYLALAHMIKFRGHFLIEGDLNPDNSDVDKLFIQLVQTYNQLFEENPINASGVDAKAILSARLSKSRRLENLIAQLPGEKKNGLFGNLIALSLGLTPNFKSNFDLAEDAKLQLSKDTYDDDLDNLLAQIGDQYADLFLAAKNLSDAILLSDILRVNTEITKAPLSASMIKRYDEHHQDLTLLKALVRQQLPEKYKEIFFDQSKNGYAGYIDGGASQEEFYKFIKPILEKMDGTEELLVKLNREDLLRKQRTFDNGSIPHQIHLGELHAILRRQEDFYPFLKDNREKIEKILTFRIPYYVGPLARGNSRFAWMTRKSEETITPWNFEEVVDKGASAQSFIERMTNFDKNLPNEKVLPKHSLLYEYFTVYNELTKVKYVTEGMRKPAFLSGEQKKAIVDLLFKTNRKVTVKQLKEDYFKKIECFDSVEISGVEDRFNASLGTYHDLLKIIKDKDFLDNEENEDILEDIVLTLTLFEDREMIEERLKTYAHLFDDKVMKQLKRRRYTGWGRLSRKLINGIRDKQSGKTILDFLKSDGFANRNFMQLIHDDSLTFKEDIQKAQVSGQGDSLHEHIANLAGSPAIKKGILQTVKVVDELVKVMGRHKPENIVIEMARENQTTQKGQKNSRERMKRIEEGIKELGSQILKEHPVENTQLQNEKLYLYYLQNGRDMYVDQELDINRLSDYDVDHIVPQSFLKDDSIDNKVLTRSDKARGKSDNVPSEEVVKKMKNYWRQLLNAKLITQRKFDNLTKAERGGLSELDKAGFIKRQLVETRQITKHVAQILDSRMNTKYDENDKLIREVKVITLKSKLVSDFRKDFQFYKVREINNYHHAHDAYLNAVVGTALIKKYPKLESEFVYGDYKVYDVRKMIAKSEQEIGKATAKYFFYSNIMNFFKTEITLANGEIRKRPLIETNGETGEIVWDKGRDFATVRKVLSMPQVNIVKKTEVQTGGFSKESILPKRNSDKLIARKKDWDPKKYGGFDSPTVAYSVLVVAKVEKGKSKKLKSVKELLGITIMERSSFEKNPIDFLEAKGYKEVKKDLIIKLPKYSLFELENGRKRMLASAGELQKGNELALPSKYVNFLYLASHYEKLKGSPEDNEQKQLFVEQHKHYLDEIIEQISEFSKRVILADANLDKVLSAYNKHRDKPIREQAENIIHLFTLTNLGAPAAFKYFDTTIDRKRYTSTKEVLDATLIHQSITGLYETRIDLSQLGGDGGEAAAKGGSGGGGGTLGDQGSRGSDPLPEPRVTLTVEGIPTEFLVNTGAEHSVLTKPMGKMGSKRTVVAGATGSKVYPWTTKRLLKIGQKQVTHSFLVIPECPAPLLGRDLLTKLKAQIQFSTEGPQVTWEDRPAMCLVLNLEEEYRLHEKPVPPSIDPSWLQLFPMVWAEKAGMGLANQVPPVVVELKSDASPVAVRQYPMSKEAREGIRPHIQRFLDLGILVPCQSPWNTPLLPVKKPGTNDYRPVQDLREVNKRVQDIHPTVPNPYNLLSSLPPSHTWYSVLDLKDAFFCLKLHPNSQPLFAFEWRDPEKGNTGQLTWTRLPQGFKNSPTLFDEALHRDLASFRALNPQVVMLQYVDDLLVAAPTYRDCKEGTRRLLQELSKLGYRVSAKKAQLCREEVTYLGYLLKGGKRWLTPARKATVMKIPTPTTPRQVREFLGTAGFCRLWIPGFASLAAPLYPLTREKVPFTWTEAHQEAFGRIKEALLSAPALALPDLTKPFALYVDEKEGVARGVLTQTLGPWRRPVAYLSKKLDPVASGWPTCLKAIAAVALLLKDADKLTLGQNVLVIAPHNLESIVRQPPDRWMTNARMTHYQSLLLNERVSFAPPAILNPATLLPVESDDTPIHICSEILAEETGTRPDLRDQPLPGVPAWYTDGSSFIMDGRRQAGAAIVDNKRTVWASNLPEGTSAQKAELIALTQALRLAEGKSINIYTDSRYAFATAHVHGAIYKQRGLLTSAGKDIKNKEEILALLEAIHLPKRVAIIHCPGHQRGTDPVATGNRKADEAAKQAAQSTRILTETTKNAGKRTADGSEFEKRTADGSEFESPKKKAKVE

SEQ ID NO: 6942 - protein, 2127 aa, synthetic construct
MPAAKRVKLDGGDKKYSIGLDIGTNSVGWAVITDEYKVPSKKFKVLGNTDRHSIKKNLIGALLFDSGETAEATRLKRTARRRYTRRKNRICYLQEIFSNEMAKVDDSFFHRLEESFLVEEDKKHERHPIFGNIVDEVAYHEKYPTIYHLRKKLVDSTDKADLRLIYLALAHMIKFRGHFLIEGDLNPDNSDVDKLFIQLVQTYNQLFEENPINASGVDAKAILSARLSKSRRLENLIAQLPGEKKNGLFGNLIALSLGLTPNFKSNFDLAEDAKLQLSKDTYDDDLDNLLAQIGDQYADLFLAAKNLSDAILLSDILRVNTEITKAPLSASMIKRYDEHHQDLTLLKALVRQQLPEKYKEIFFDQSKNGYAGYIDGGASQEEFYKFIKPILEKMDGTEELLVKLNREDLLRKQRTFDNGSIPHQIHLGELHAILRRQEDFYPFLKDNREKIEKILTFRIPYYVGPLARGNSRFAWMTRKSEETITPWNFEEVVDKGASAQSFIERMTNFDKNLPNEKVLPKHSLLYEYFTVYNELTKVKYVTEGMRKPAFLSGEQKKAIVDLLFKTNRKVTVKQLKEDYFKKIECFDSVEISGVEDRFNASLGTYHDLLKIIKDKDFLDNEENEDILEDIVLTLTLFEDREMIEERLKTYAHLFDDKVMKQLKRRRYTGWGRLSRKLINGIRDKQSGKTILDFLKSDGFANRNFMQLIHDDSLTFKEDIQKAQVSGQGDSLHEHIANLAGSPAIKKGILQTVKVVDELVKVMGRHKPENIVIEMARENQTTQKGQKNSRERMKRIEEGIKELGSQILKEHPVENTQLQNEKLYLYYLQNGRDMYVDQELDINRLSDYDVDHIVPQSFLKDDSIDNKVLTRSDKARGKSDNVPSEEVVKKMKNYWRQLLNAKLITQRKFDNLTKAERGGLSELDKAGFIKRQLVETRQITKHVAQILDSRMNTKYDENDKLIREVKVITLKSKLVSDFRKDFQFYKVREINNYHHAHDAYLNAVVGTALIKKYPKLESEFVYGDYKVYDVRKMIAKSEQEIGKATAKYFFYSNIMNFFKTEITLANGEIRKRPLIETNGETGEIVWDKGRDFATVRKVLSMPQVNIVKKTEVQTGGFSKESILPKRNSDKLIARKKDWDPKKYGGFDSPTVAYSVLVVAKVEKGKSKKLKSVKELLGITIMERSSFEKNPIDFLEAKGYKEVKKDLIIKLPKYSLFELENGRKRMLASAGELQKGNELALPSKYVNFLYLASHYEKLKGSPEDNEQKQLFVEQHKHYLDEIIEQISEFSKRVILADANLDKVLSAYNKHRDKPIREQAENIIHLFTLTNLGAPAAFKYFDTTIDRKRYTSTKEVLDATLIHQSITGLYETRIDLSQLGGDGGEAAAKGGSGGGGGLLGRDLLTKLKAQIQFSTEGPQVTWEDRPAMCLVLNLEEEYRLHEKPVPPSIDPSWLQLFPMVWAEKAGMGLANQVPPVVVELKSDASPVAVRQYPMSKEAREGIRPHIQRFLDLGILVPCQSPWNTPLLPVKKPGTNDYRPVQDLREVNKRVQDIHPTVPNPYNLLSSLPPSHTWYSVLDLKDAFFCLKLHPNSQPLFAFEWRDPEKGNTGQLTWTRLPQGFKNSPTLFNEALHRDLASFRALNPQVVMLQYVDDLLVAAPTYRDCKEGTRRLLQELSKLGYRVSAKKAQLCREEVTYLGYLLKGGKRWLTPARKATVMKIPTPTTPRQVREFLGTAGFCRLWIPGFASLAAPLYPLTRPKVPFTWTEAHQEAFGRIKEALLSAPALALPDLTKPFALYVDEKEGVARGVLTQTLGPWRRPVAYLSKKLDPVASGWPTCLKAIAAVALLLKDADKLTLGQNVLVIAPHNLESIVRQPPDRWMTNARMTHYQSLLLNERVSFAPPAILNPATLLPVESDDTPIHICSEILAEETGTRPDLRDQPLPGVPAWYTDGSSFIMDGRRQAGAAIVDNKRTVWASNLPEGTSAQKAELIALTQALRLAEGKSINIYTDSRYAFATAHVHGAIYKQRGWLTSAGKDIKNKEEILALLEAIHLPKRVAIIHCPGHQRGTDPVATGNRKADEAAKQAAQSTRILTETTKNAGKRTADGSEFEKRTADGSEFESPKKKAKVE

SEQ ID NO: 6943 - protein, 2127 aa, synthetic construct
MPAAKRVKLDGGDKKYSIGLDIGTNSVGWAVITDEYKVPSKKFKVLGNTDRHSIKKNLIGALLFDSGETAEATRLKRTARRRYTRRKNRICYLQEIFSNEMAKVDDSFFHRLEESFLVEEDKKHERHPIFGNIVDEVAYHEKYPTIYHLRKKLVDSTDKADLRLIYLALAHMIKFRGHFLIEGDLNPDNSDVDKLFIQLVQTYNQLFEENPINASGVDAKAILSARLSKSRRLENLIAQLPGEKKNGLFGNLIALSLGLTPNFKSNFDLAEDAKLQLSKDTYDDDLDNLLAQIGDQYADLFLAAKNLSDAILLSDILRVNTEITKAPLSASMIKRYDEHHQDLTLLKALVRQQLPEKYKEIFFDQSKNGYAGYIDGGASQEEFYKFIKPILEKMDGTEELLVKLNREDLLRKQRTFDNGSIPHQIHLGELHAILRRQEDFYPFLKDNREKIEKILTFRIPYYVGPLARGNSRFAWMTRKSEETITPWNFEEVVDKGASAQSFIERMTNFDKNLPNEKVLPKHSLLYEYFTVYNELTKVKYVTEGMRKPAFLSGEQKKAIVDLLFKTNRKVTVKQLKEDYFKKIECFDSVEISGVEDRFNASLGTYHDLLKIIKDKDFLDNEENEDILEDIVLTLTLFEDREMIEERLKTYAHLFDDKVMKQLKRRRYTGWGRLSRKLINGIRDKQSGKTILDFLKSDGFANRNFMQLIHDDSLTFKEDIQKAQVSGQGDSLHEHIANLAGSPAIKKGILQTVKVVDELVKVMGRHKPENIVIEMARENQTTQKGQKNSRERMKRIEEGIKELGSQILKEHPVENTQLQNEKLYLYYLQNGRDMYVDQELDINRLSDYDVDHIVPQSFLKDDSIDNKVLTRSDKARGKSDNVPSEEVVKKMKNYWRQLLNAKLITQRKFDNLTKAERGGLSELDKAGFIKRQLVETRQITKHVAQILDSRMNTKYDENDKLIREVKVITLKSKLVSDFRKDFQFYKVREINNYHHAHDAYLNAVVGTALIKKYPKLESEFVYGDYKVYDVRKMIAKSEQEIGKATAKYFFYSNIMNFFKTEITLANGEIRKRPLIETNGETGEIVWDKGRDFATVRKVLSMPQVNIVKKTEVQTGGFSKESILPKRNSDKLIARKKDWDPKKYGGFDSPTVAYSVLVVAKVEKGKSKKLKSVKELLGITIMERSSFEKNPIDFLEAKGYKEVKKDLIIKLPKYSLFELENGRKRMLASAGELQKGNELALPSKYVNFLYLASHYEKLKGSPEDNEQKQLFVEQHKHYLDEIIEQISEFSKRVILADANLDKVLSAYNKHRDKPIREQAENIIHLFTLTNLGAPAAFKYFDTTIDRKRYTSTKEVLDATLIHQSITGLYETRIDLSQLGGDGGEAAAKGGSGGGGGLLGRDLLTKLKAQIQFSTEGPQVTWEDRPAMCLVLNLEEEYRLHEKPVPPSIDPSWLQLFPMVWAEKAGMGLANQVPPVVVELKSDASPVAVRQYPMSKEAREGIRPHIQRFLDLGILVPCQSPWNTPLLPVKKPGTNDYRPVQDLREVNKRVQDIHPTVPNPYNLLSSLPPSHTWYSVLDLKDAFFCLKLHPNSQPLFAFEWRDPEKGNTGQLTWTRLPQGFKNSPTLFNEALHRDLASFRALNPQVVMLQYVDDLLVAAPTYRDCKEGTRRLLQELSKLGYRVSAKKAQLCREEVTYLGYLLKGGKRWLTPARKATVMKIPTPTTPRQVREFLGKAGFCRLFIPGFASLAAPLYPLTRPKVPFTWTEAHQEAFGRIKEALLSAPALALPDLTKPFALYVDEKEGVARGVLTQTLGPWRRPVAYLSKKLDPVASGWPTCLKAIAAVALLLKDADKLTLGQNVLVIAPHNLESIVRQPPDRWMTNARMTHYQSLLLNERVSFAPPAILNPATLLPVESDDTPIHICSEILAEETGTRPDLRDQPLPGVPAWYTDGSSFIMDGRRQAGAAIVDNKRTVWASNLPEGTSAQKAELIALTQALRLAEGKSINIYTDSRYAFATAHVHGAIYKQRGWLTSAGKDIKNKEEILALLEAIHLPKRVAIIHCPGHQRGTDPVATGNRKADEAAKQAAQSTRILTETTKNAGKRTADGSEFEKRTADGSEFESPKKKAKVE

SEQ ID NO: 6944 - protein, 2218 aa, synthetic construct
MPAAKRVKLDGGDKKYSIGLDIGTNSVGWAVITDEYKVPSKKFKVLGNTDRHSIKKNLIGALLFDSGETAEATRLKRTARRRYTRRKNRICYLQEIFSNEMAKVDDSFFHRLEESFLVEEDKKHERHPIFGNIVDEVAYHEKYPTIYHLRKKLVDSTDKADLRLIYLALAHMIKFRGHFLIEGDLNPDNSDVDKLFIQLVQTYNQLFEENPINASGVDAKAILSARLSKSRRLENLIAQLPGEKKNGLFGNLIALSLGLTPNFKSNFDLAEDAKLQLSKDTYDDDLDNLLAQIGDQYADLFLAAKNLSDAILLSDILRVNTEITKAPLSASMIKRYDEHHQDLTLLKALVRQQLPEKYKEIFFDQSKNGYAGYIDGGASQEEFYKFIKPILEKMDGTEELLVKLNREDLLRKQRTFDNGSIPHQIHLGELHAILRRQEDFYPFLKDNREKIEKILTFRIPYYVGPLARGNSRFAWMTRKSEETITPWNFEEVVDKGASAQSFIERMTNFDKNLPNEKVLPKHSLLYEYFTVYNELTKVKYVTEGMRKPAFLSGEQKKAIVDLLFKTNRKVTVKQLKEDYFKKIECFDSVEISGVEDRFNASLGTYHDLLKIIKDKDFLDNEENEDILEDIVLTLTLFEDREMIEERLKTYAHLFDDKVMKQLKRRRYTGWGRLSRKLINGIRDKQSGKTILDFLKSDGFANRNFMQLIHDDSLTFKEDIQKAQVSGQGDSLHEHIANLAGSPAIKKGILQTVKVVDELVKVMGRHKPENIVIEMARENQTTQKGQKNSRERMKRIEEGIKELGSQILKEHPVENTQLQNEKLYLYYLQNGRDMYVDQELDINRLSDYDVDHIVPQSFLKDDSIDNKVLTRSDKARGKSDNVPSEEVVKKMKNYWRQLLNAKLITQRKFDNLTKAERGGLSELDKAGFIKRQLVETRQITKHVAQILDSRMNTKYDENDKLIREVKVITLKSKLVSDFRKDFQFYKVREINNYHHAHDAYLNAVVGTALIKKYPKLESEFVYGDYKVYDVRKMIAKSEQEIGKATAKYFFYSNIMNFFKTEITLANGEIRKRPLIETNGETGEIVWDKGRDFATVRKVLSMPQVNIVKKTEVQTGGFSKESILPKRNSDKLIARKKDWDPKKYGGFDSPTVAYSVLVVAKVEKGKSKKLKSVKELLGITIMERSSFEKNPIDFLEAKGYKEVKKDLIIKLPKYSLFELENGRKRMLASAGELQKGNELALPSKYVNFLYLASHYEKLKGSPEDNEQKQLFVEQHKHYLDEIIEQISEFSKRVILADANLDKVLSAYNKHRDKPIREQAENIIHLFTLTNLGAPAAFKYFDTTIDRKRYTSTKEVLDATLIHQSITGLYETRIDLSQLGGDGGEAAAKGGSGGGGGTLGDQGSRGSDPLPEPRVTLTVEGIPTEFLVNTGAEHSVLTKPMGKMGSKRTVVAGATGSKVYPWTTKRLLKIGQKQVTHSFLVIPECPAPLLGRDLLTKLKAQIQFSTEGPQVTWEDRPAMCLVLNLEEEYRLHEKPVPPSIDPSWLQLFPMVWAEKAGMGLANQVPPVVVELKSDASPVAVRQYPMSKEAREGIRPHIQRFLDLGILVPCQSPWNTPLLPVKKPGTNDYRPVQDLREVNKRVQDIHPTVPNPYNLLSSLPPSHTWYSVLDLKDAFFCLKLHPNSQPLFAFEWRDPEKGNTGQLTWTRLPQGFKNSPTLFNEALHRDLASFRALNPQVVMLQYVDDLLVAAPTYRDCKEGTRRLLQELSKLGYRVSAKKAQLCREEVTYLGYLLKGGKRWLTPARKATVMKIPTPTTPRQVREFLGTAGFCRLWIPGFASLAAPLYPLTRPKVPFTWTEAHQEAFGRIKEALLSAPALALPDLTKPFALYVDEKEGVARGVLTQTLGPWRRPVAYLSKKLDPVASGWPTCLKAIAAVALLLKDADKLTLGQNVLVIAPHNLESIVRQPPDRWMTNARMTHYQSLLLNERVSFAPPAILNPATLLPVESDDTPIHICSEILAEETGTRPDLRDQPLPGVPAWYTDGSSFIMDGRRQAGAAIVDNKRTVWASNLPEGTSAQKAELIALTQALRLAEGKSINIYTDSRYAFATAHVHGAIYKQRGWLTSAGKDIKNKEEILALLEAIHLPKRVAIIHCPGHQRGTDPVATGNRKADEAAKQAAQSTRILTETTKNAGKRTADGSEFEKRTADGSEFESPKKKAKVE

SEQ ID NO: 6945 - protein, 2218 aa, synthetic construct
MPAAKRVKLDGGDKKYSIGLDIGTNSVGWAVITDEYKVPSKKFKVLGNTDRHSIKKNLIGALLFDSGETAEATRLKRTARRRYTRRKNRICYLQEIFSNEMAKVDDSFFHRLEESFLVEEDKKHERHPIFGNIVDEVAYHEKYPTIYHLRKKLVDSTDKADLRLIYLALAHMIKFRGHFLIEGDLNPDNSDVDKLFIQLVQTYNQLFEENPINASGVDAKAILSARLSKSRRLENLIAQLPGEKKNGLFGNLIALSLGLTPNFKSNFDLAEDAKLQLSKDTYDDDLDNLLAQIGDQYADLFLAAKNLSDAILLSDILRVNTEITKAPLSASMIKRYDEHHQDLTLLKALVRQQLPEKYKEIFFDQSKNGYAGYIDGGASQEEFYKFIKPILEKMDGTEELLVKLNREDLLRKQRTFDNGSIPHQIHLGELHAILRRQEDFYPFLKDNREKIEKILTFRIPYYVGPLARGNSRFAWMTRKSEETITPWNFEEVVDKGASAQSFIERMTNFDKNLPNEKVLPKHSLLYEYFTVYNELTKVKYVTEGMRKPAFLSGEQKKAIVDLLFKTNRKVTVKQLKEDYFKKIECFDSVEISGVEDRFNASLGTYHDLLKIIKDKDFLDNEENEDILEDIVLTLTLFEDREMIEERLKTYAHLFDDKVMKQLKRRRYTGWGRLSRKLINGIRDKQSGKTILDFLKSDGFANRNFMQLIHDDSLTFKEDIQKAQVSGQGDSLHEHIANLAGSPAIKKGILQTVKVVDELVKVMGRHKPENIVIEMARENQTTQKGQKNSRERMKRIEEGIKELGSQILKEHPVENTQLQNEKLYLYYLQNGRDMYVDQELDINRLSDYDVDHIVPQSFLKDDSIDNKVLTRSDKARGKSDNVPSEEVVKKMKNYWRQLLNAKLITQRKFDNLTKAERGGLSELDKAGFIKRQLVETRQITKHVAQILDSRMNTKYDENDKLIREVKVITLKSKLVSDFRKDFQFYKVREINNYHHAHDAYLNAVVGTALIKKYPKLESEFVYGDYKVYDVRKMIAKSEQEIGKATAKYFFYSNIMNFFKTEITLANGEIRKRPLIETNGETGEIVWDKGRDFATVRKVLSMPQVNIVKKTEVQTGGFSKESILPKRNSDKLIARKKDWDPKKYGGFDSPTVAYSVLVVAKVEKGKSKKLKSVKELLGITIMERSSFEKNPIDFLEAKGYKEVKKDLIIKLPKYSLFELENGRKRMLASAGELQKGNELALPSKYVNFLYLASHYEKLKGSPEDNEQKQLFVEQHKHYLDEIIEQISEFSKRVILADANLDKVLSAYNKHRDKPIREQAENIIHLFTLTNLGAPAAFKYFDTTIDRKRYTSTKEVLDATLIHQSITGLYETRIDLSQLGGDGGEAAAKGGSGGGGGTLGDQGSRGSDPLPEPRVTLTVEGIPTEFLVNTGAEHSVLTKPMGKMGSKRTVVAGATGSKVYPWTTKRLLKIGQKQVTHSFLVIPECPAPLLGRDLLTKLKAQIQFSTEGPQVTWEDRPAMCLVLNLEEEYRLHEKPVPPSIDPSWLQLFPMVWAEKAGMGLANQVPPVVVELKSDASPVAVRQYPMSKEAREGIRPHIQRFLDLGILVPCQSPWNTPLLPVKKPGTNDYRPVQDLREVNKRVQDIHPTVPNPYNLLSSLPPSHTWYSVLDLKDAFFCLKLHPNSQPLFAFEWRDPEKGNTGQLTWTRLPQGFKNSPTLFNEALHRDLASFRALNPQVVMLQYVDDLLVAAPTYRDCKEGTRRLLQELSKLGYRVSAKKAQLCREEVTYLGYLLKGGKRWLTPARKATVMKIPTPTTPRQVREFLGKAGFCRLFIPGFASLAAPLYPLTRPKVPFTWTEAHQEAFGRIKEALLSAPALALPDLTKPFALYVDEKEGVARGVLTQTLGPWRRPVAYLSKKLDPVASGWPTCLKAIAAVALLLKDADKLTLGQNVLVIAPHNLESIVRQPPDRWMTNARMTHYQSLLLNERVSFAPPAILNPATLLPVESDDTPIHICSEILAEETGTRPDLRDQPLPGVPAWYTDGSSFIMDGRRQAGAAIVDNKRTVWASNLPEGTSAQKAELIALTQALRLAEGKSINIYTDSRYAFATAHVHGAIYKQRGWLTSAGKDIKNKEEILALLEAIHLPKRVAIIHCPGHQRGTDPVATGNRKADEAAKQAAQSTRILTETTKNAGKRTADGSEFEKRTADGSEFESPKKKAKVE

SEQ ID NO: 6946 - protein, 2096 aa, synthetic construct
MPAAKRVKLDGGDKKYSIGLDIGTNSVGWAVITDEYKVPSKKFKVLGNTDRHSIKKNLIGALLFDSGETAEATRLKRTARRRYTRRKNRICYLQEIFSNEMAKVDDSFFHRLEESFLVEEDKKHERHPIFGNIVDEVAYHEKYPTIYHLRKKLVDSTDKADLRLIYLALAHMIKFRGHFLIEGDLNPDNSDVDKLFIQLVQTYNQLFEENPINASGVDAKAILSARLSKSRRLENLIAQLPGEKKNGLFGNLIALSLGLTPNFKSNFDLAEDAKLQLSKDTYDDDLDNLLAQIGDQYADLFLAAKNLSDAILLSDILRVNTEITKAPLSASMIKRYDEHHQDLTLLKALVRQQLPEKYKEIFFDQSKNGYAGYIDGGASQEEFYKFIKPILEKMDGTEELLVKLNREDLLRKQRTFDNGSIPHQIHLGELHAILRRQEDFYPFLKDNREKIEKILTFRIPYYVGPLARGNSRFAWMTRKSEETITPWNFEEVVDKGASAQSFIERMTNFDKNLPNEKVLPKHSLLYEYFTVYNELTKVKYVTEGMRKPAFLSGEQKKAIVDLLFKTNRKVTVKQLKEDYFKKIECFDSVEISGVEDRFNASLGTYHDLLKIIKDKDFLDNEENEDILEDIVLTLTLFEDREMIEERLKTYAHLFDDKVMKQLKRRRYTGWGRLSRKLINGIRDKQSGKTILDFLKSDGFANRNFMQLIHDDSLTFKEDIQKAQVSGQGDSLHEHIANLAGSPAIKKGILQTVKVVDELVKVMGRHKPENIVIEMARENQTTQKGQKNSRERMKRIEEGIKELGSQILKEHPVENTQLQNEKLYLYYLQNGRDMYVDQELDINRLSDYDVDHIVPQSFLKDDSIDNKVLTRSDKARGKSDNVPSEEVVKKMKNYWRQLLNAKLITQRKFDNLTKAERGGLSELDKAGFIKRQLVETRQITKHVAQILDSRMNTKYDENDKLIREVKVITLKSKLVSDFRKDFQFYKVREINNYHHAHDAYLNAVVGTALIKKYPKLESEFVYGDYKVYDVRKMIAKSEQEIGKATAKYFFYSNIMNFFKTEITLANGEIRKRPLIETNGETGEIVWDKGRDFATVRKVLSMPQVNIVKKTEVQTGGFSKESILPKRNSDKLIARKKDWDPKKYGGFDSPTVAYSVLVVAKVEKGKSKKLKSVKELLGITIMERSSFEKNPIDFLEAKGYKEVKKDLIIKLPKYSLFELENGRKRMLASAGELQKGNELALPSKYVNFLYLASHYEKLKGSPEDNEQKQLFVEQHKHYLDEIIEQISEFSKRVILADANLDKVLSAYNKHRDKPIREQAENIIHLFTLTNLGAPAAFKYFDTTIDRKRYTSTKEVLDATLIHQSITGLYETRIDLSQLGGDGGEAAAKGGSGGGGGTLNLEDEYRLYETSAEPEVSPGSTWLSDFPQAWAETGGMGLAVRQAPLIIPLKATSTPVSIKQYPMSQEAKLGIKPHIQRLLDQGILVPCQSPWNTPLLPVKKPGTNDYRPVQDLREVNKRVEDIHPTVPNPYNLLSGLPPSHRWYTVLDLKDAFFCLRLHPTSQPLFAFEWRDPGMGISGQLTWTRLPQGFKNSPTLFNEALHRDLADFRIQHPDLILLQYVDDILLAATSELDCQQGTRALLLTLGNLGYRASAKKAQLCQKQVKYLGYLLKEGQRWLTEARKETVMGQPTPKTPRQLREFLGTAGFCRLWIPGFAEMAAPLYPLTKPGTLFNWGPDQQKAYQEIKQALLTAPALGLPDLTKPFELFVDEKQGYAKGVLTQKLGPWRRPVAYLSKKLDPVAAGWPPCLRMVAAIAVLRKDAGKLTMGQPLVILAPHAVEALVKQPPDRWLSNARMTHYQAMLLDTDRVQFGPVVALNPATLLPLPEEGAPHDCLEILAETHGTRPDLTDQPIPDADHTWYTDGSSFLQEGQRKAGAAVTTETEVIWARALPAGTSAQRAELIALTQALKMAEGKRLNVYTDSRYAFATAHIHGEIYRRRGWLTSEGREIKNKSEILALLKALFLPKRLSIIHCLGHQKGDSAEARGNRLADQAAREAAIKTPPDTSTLLAGKRTADGSEFEKRTADGSEFESPKKKAKVE

SEQ ID NO: 6947 - protein, 2096 aa, synthetic construct
MPAAKRVKLDGGDKKYSIGLDIGTNSVGWAVITDEYKVPSKKFKVLGNTDRHSIKKNLIGALLFDSGETAEATRLKRTARRRYTRRKNRICYLQEIFSNEMAKVDDSFFHRLEESFLVEEDKKHERHPIFGNIVDEVAYHEKYPTIYHLRKKLVDSTDKADLRLIYLALAHMIKFRGHFLIEGDLNPDNSDVDKLFIQLVQTYNQLFEENPINASGVDAKAILSARLSKSRRLENLIAQLPGEKKNGLFGNLIALSLGLTPNFKSNFDLAEDAKLQLSKDTYDDDLDNLLAQIGDQYADLFLAAKNLSDAILLSDILRVNTEITKAPLSASMIKRYDEHHQDLTLLKALVRQQLPEKYKEIFFDQSKNGYAGYIDGGASQEEFYKFIKPILEKMDGTEELLVKLNREDLLRKQRTFDNGSIPHQIHLGELHAILRRQEDFYPFLKDNREKIEKILTFRIPYYVGPLARGNSRFAWMTRKSEETITPWNFEEVVDKGASAQSFIERMTNFDKNLPNEKVLPKHSLLYEYFTVYNELTKVKYVTEGMRKPAFLSGEQKKAIVDLLFKTNRKVTVKQLKEDYFKKIECFDSVEISGVEDRFNASLGTYHDLLKIIKDKDFLDNEENEDILEDIVLTLTLFEDREMIEERLKTYAHLFDDKVMKQLKRRRYTGWGRLSRKLINGIRDKQSGKTILDFLKSDGFANRNFMQLIHDDSLTFKEDIQKAQVSGQGDSLHEHIANLAGSPAIKKGILQTVKVVDELVKVMGRHKPENIVIEMARENQTTQKGQKNSRERMKRIEEGIKELGSQILKEHPVENTQLQNEKLYLYYLQNGRDMYVDQELDINRLSDYDVDHIVPQSFLKDDSIDNKVLTRSDKARGKSDNVPSEEVVKKMKNYWRQLLNAKLITQRKFDNLTKAERGGLSELDKAGFIKRQLVETRQITKHVAQILDSRMNTKYDENDKLIREVKVITLKSKLVSDFRKDFQFYKVREINNYHHAHDAYLNAVVGTALIKKYPKLESEFVYGDYKVYDVRKMIAKSEQEIGKATAKYFFYSNIMNFFKTEITLANGEIRKRPLIETNGETGEIVWDKGRDFATVRKVLSMPQVNIVKKTEVQTGGFSKESILPKRNSDKLIARKKDWDPKKYGGFDSPTVAYSVLVVAKVEKGKSKKLKSVKELLGITIMERSSFEKNPIDFLEAKGYKEVKKDLIIKLPKYSLFELENGRKRMLASAGELQKGNELALPSKYVNFLYLASHYEKLKGSPEDNEQKQLFVEQHKHYLDEIIEQISEFSKRVILADANLDKVLSAYNKHRDKPIREQAENIIHLFTLTNLGAPAAFKYFDTTIDRKRYTSTKEVLDATLIHQSITGLYETRIDLSQLGGDGGEAAAKGGSGGGGGLGIEDEYRLHETSTEPDVSLGSTWLSDFPQAWAETGGMGLAVRQAPLIIPLKATSTPVSIQQYPMSHEARLGIKPHIQRLLDQGILVPCQSPWNTPLLPVKKPGTNDYRPVQDLREVNKRVEDIHPTVPNPYNLLSGLPPSHQWYTVLDLKDAFFCLRLHPTSQPLFAFEWRDPGMGISGQLTWTRLPQGFKNSPTLFNEALHRDLADFRIQHPDLILLQYVDDILLAATSELDCQQGTRALLQTLGDLGYRASAKKAQICQKQVKYLGYLLREGQRWLTEARKETVMGQPVPKTPRQLREFLGKAGFCRLFIPGFAEMAAPLYPLTKPGTLFSWGPDQQKAYQEIKQALLTAPALGLPDLTKPFELFVDEKQGYAKGVLTQKLGPWRRPVAYLSKKLDPVAAGWPPCLRMVAAIAVLTKDAGKLTMGQPLVILAPHAVEALVKQPPDRWLSNARMTHYQAMLLDTDRVQFGPVVALNPATLLPLPEEGAPHDCLEILAETHGTRPDLTDQPIPDADHTWYTDGSSFLQEGQRKAGAAVTTETEVIWAGALPAGTSAQRAELIALTQALKMAEGKRLNVYTDSRYAFATAHIHGEIYRRRGWLTSEGREIKNKSEILALLKALFLPKRLSIIHCLGHQKGDSAEARGNRLADQAAREAAIKTPPDTSTLLIAGKRTADGSEFEKRTADGSEFESPKKKAKVE

SEQ ID NO: 6948 - protein, 2096 aa, synthetic construct; identical to SEQ ID NO: 6947

SEQ ID NO: 6949 - protein, 2096 aa, synthetic construct
MPAAKRVKLDGGDKKYSIGLDIGTNSVGWAVITDEYKVPSKKFKVLGNTDRHSIKKNLIGALLFDSGETAEATRLKRTARRRYTRRKNRICYLQEIFSNEMAKVDDSFFHRLEESFLVEEDKKHERHPIFGNIVDEVAYHEKYPTIYHLRKKLVDSTDKADLRLIYLALAHMIKFRGHFLIEGDLNPDNSDVDKLFIQLVQTYNQLFEENPINASGVDAKAILSARLSKSRRLENLIAQLPGEKKNGLFGNLIALSLGLTPNFKSNFDLAEDAKLQLSKDTYDDDLDNLLAQIGDQYADLFLAAKNLSDAILLSDILRVNTEITKAPLSASMIKRYDEHHQDLTLLKALVRQQLPEKYKEIFFDQSKNGYAGYIDGGASQEEFYKFIKPILEKMDGTEELLVKLNREDLLRKQRTFDNGSIPHQIHLGELHAILRRQEDFYPFLKDNREKIEKILTFRIPYYVGPLARGNSRFAWMTRKSEETITPWNFEEVVDKGASAQSFIERMTNFDKNLPNEKVLPKHSLLYEYFTVYNELTKVKYVTEGMRKPAFLSGEQKKAIVDLLFKTNRKVTVKQLKEDYFKKIECFDSVEISGVEDRFNASLGTYHDLLKIIKDKDFLDNEENEDILEDIVLTLTLFEDREMIEERLKTYAHLFDDKVMKQLKRRRYTGWGRLSRKLINGIRDKQSGKTILDFLKSDGFANRNFMQLIHDDSLTFKEDIQKAQVSGQGDSLHEHIANLAGSPAIKKGILQTVKVVDELVKVMGRHKPENIVIEMARENQTTQKGQKNSRERMKRIEEGIKELGSQILKEHPVENTQLQNEKLYLYYLQNGRDMYVDQELDINRLSDYDVDHIVPQSFLKDDSIDNKVLTRSDKARGKSDNVPSEEVVKKMKNYWRQLLNAKLITQRKFDNLTKAERGGLSELDKAGFIKRQLVETRQITKHVAQILDSRMNTKYDENDKLIREVKVITLKSKLVSDFRKDFQFYKVREINNYHHAHDAYLNAVVGTALIKKYPKLESEFVYGDYKVYDVRKMIAKSEQEIGKATAKYFFYSNIMNFFKTEITLANGEIRKRPLIETNGETGEIVWDKGRDFATVRKVLSMPQVNIVKKTEVQTGGFSKESILPKRNSDKLIARKKDWDPKKYGGFDSPTVAYSVLVVAKVEKGKSKKLKSVKELLGITIMERSSFEKNPIDFLEAKGYKEVKKDLIIKLPKYSLFELENGRKRMLASAGELQKGNELALPSKYVNFLYLASHYEKLKGSPEDNEQKQLFVEQHKHYLDEIIEQISEFSKRVILADANLDKVLSAYNKHRDKPIREQAENIIHLFTLTNLGAPAAFKYFDTTIDRKRYTSTKEVLDATLIHQSITGLYETRIDLSQLGGDGGEAAAKGGSGGGGGTLNIEDEYRLHETSKEPDVSLGSTWLSDFPQAWAETGGMGLAVRQAPLIIPLKATSTPVSIKQYPMSQEARLGIKPHIQRLLDQGILVPCQSPWNTPLLPVKKPGTNDYRPVQDLREVNKRVEDIHPTVPNPYNLLSGLPPSHQWYTVLDLKDAFFCLRLHPTSQPLFAFEWRDPEMGISGQLTWTRLPQGFKNSPTLFNEALHRDLAGFRIQHPDLILLQYVDDLLLAATSELDCQQGTRALLQTLGDLGYRASAKKAQICQKQVKYLGYLLKEGQRWLTEARKETVMGQPIPKTPRQLREFLGTAGFCRLWIPGFAEMAAPLYPLTKPGTLFNWGPDQQKAFQEIKQALLTAPALGLPDLTKPFELFVDEKQGYAKGVLTQKLGPWRRPVAYLSKKLDPVAAGWPPCLRMVAAIAVLTKDAGKLTMGQPLVILAPHAVEALVKQPPDRWLSNARMTHYQALLLDTDRVQFGPVVALNPATLLPLPEEGLQHDCLDILAEAHGTRSDLMDQPLPDADHTWYTDGSSFLQEGQRKAGAAVTTETEVIWARALPAGTSAQRAELIALTQALKMAEGKKLNVYTDSRYAFATAHIHGEIYRRRGWLTSEGKEIKNKDEILALLKALFLPKRLSIIHCPGHQKGNSAEARGNRMADQAAREVATRETPETSTLLAGKRTADGSEFEKRTADGSEFESPKKKAKVE

SEQ ID NO: 6950 - protein, 2090 aa, synthetic construct
MPAAKRVKLDGGDKKYSIGLDIGTNSVGWAVITDEYKVPSKKFKVLGNTDRHSIKKNLIGALLFDSGETAEATRLKRTARRRYTRRKNRICYLQEIFSNEMAKVDDSFFHRLEESFLVEEDKKHERHPIFGNIVDEVAYHEKYPTIYHLRKKLVDSTDKADLRLIYLALAHMIKFRGHFLIEGDLNPDNSDVDKLFIQLVQTYNQLFEENPINASGVDAKAILSARLSKSRRLENLIAQLPGEKKNGLFGNLIALSLGLTPNFKSNFDLAEDAKLQLSKDTYDDDLDNLLAQIGDQYADLFLAAKNLSDAILLSDILRVNTEITKAPLSASMIKRYDEHHQDLTLLKALVRQQLPEKYKEIFFDQSKNGYAGYIDGGASQEEFYKFIKPILEKMDGTEELLVKLNREDLLRKQRTFDNGSIPHQIHLGELHAILRRQEDFYPFLKDNREKIEKILTFRIPYYVGPLARGNSRFAWMTRKSEETITPWNFEEVVDKGASAQSFIERMTNFDKNLPNEKVLPKHSLLYEYFTVYNELTKVKYVTEGMRKPAFLSGEQKKAIVDLLFKTNRKVTVKQLKEDYFKKIECFDSVEISGVEDRFNASLGTYHDLLKIIKDKDFLDNEENEDILEDIVLTLTLFEDREMIEERLKTYAHLFDDKVMKQLKRRRYTGWGRLSRKLINGIRDKQSGKTILDFLKSDGFANRNFMQLIHDDSLTFKEDIQKAQVSGQGDSLHEHIANLAGSPAIKKGILQTVKVVDELVKVMGRHKPENIVIEMARENQTTQKGQKNSRERMKRIEEGIKELGSQILKEHPVENTQLQNEKLYLYYLQNGRDMYVDQELDINRLSDYDVDHIVPQSFLKDDSIDNKVLTRSDKARGKSDNVPSEEVVKKMKNYWRQLLNAKLITQRKFDNLTKAERGGLSELDKAGFIKRQLVETRQITKHVAQILDSRMNTKYDENDKLIREVKVITLKSKLVSDFRKDFQFYKVREINNYHHAHDAYLNAVVGTALIKKYPKLESEFVYGDYKVYDVRKMIAKSEQEIGKATAKYFFYSNIMNFFKTEITLANGEIRKRPLIETNGETGEIVWDKGRDFATVRKVLSMPQVNIVKKTEVQTGGFSKESILPKRNSDKLIARKKDWDPKKYGGFDSPTVAYSVLVVAKVEKGKSKKLKSVKELLGITIMERSSFEKNPIDFLEAKGYKEVKKDLIIKLPKYSLFELENGRKRMLASAGELQKGNELALPSKYVNFLYLASHYEKLKGSPEDNEQKQLFVEQHKHYLDEIIEQISEFSKRVILADANLDKVLSAYNKHRDKPIREQAENIIHLFTLTNLGAPAAFKYFDTTIDRKRYTSTKEVLDATLIHQSITGLYETRIDLSQLGGDGGEAAAKGGSGGGGGTLQLDDEYRLYSPLVKPDQNIQFWLEQFPQAWAETAGMGLAKQVPPQVIQLKASATPVSVRQYPLSKEAQEGIRPHVQRLIQQGILVPVQSPWNTPLLPVRKPGTNDYRPVQDLREVNKRVQDIHPTVPNPYNLLCALPPQRSWYTVLDLKDAFFCLRLHPTSQPLFAFEWRDPGTGRTGQLTWTRLPQGFKNSPTIFDEALHRDLANFRIQHPQVTLLQYVDDLLLAGATKQDCLEGTKALLLELSDLGYRASAKKAQICRREVTYLGYSLRDGQRWLTEARKKTVVQIPAPTTAKQVREFLGTAGFCRLWIPGFATLAAPLYPLTKEKGEFSWAPEHQKAFDAIKKALLSAPALALPDVTKPFTLYVDERKGVARGVLTQTLGPWRRPVAYLSKKLDPVASGWPVCLKAIAAVAILVKDADKLTLGQNITVIAPHALENIVRQPPDRWMTNARMTHYQSLLLTERVTFAPPAALNPATLLPEETDEPVTHDCHQLLIEETGVRKDLTDIPLTGEVLTWFTDGSSYVVEGKRMAGAAVVDGTRTIWASSLPEGTSAQKAELMALTQALRLAEGKSINIYTDSRYAFATAHVHGAIYKQRGLLTSAGREIKNKEEILSLLEALHLPKRLAIIHCPGHQKAKDPISRGNQMADRVAKQAAQGVNLLAGKRTADGSEFEKRTADGSEFESPKKKAKVE

SEQ ID NO: 6951 - protein, 2087 aa, synthetic construct
MPAAKRVKLDGGDKKYSIGLDIGTNSVGWAVITDEYKVPSKKFKVLGNTDRHSIKKNLIGALLFDSGETAEATRLKRTARRRYTRRKNRICYLQEIFSNEMAKVDDSFFHRLEESFLVEEDKKHERHPIFGNIVDEVAYHEKYPTIYHLRKKLVDSTDKADLRLIYLALAHMIKFRGHFLIEGDLNPDNSDVDKLFIQLVQTYNQLFEENPINASGVDAKAILSARLSKSRRLENLIAQLPGEKKNGLFGNLIALSLGLTPNFKSNFDLAEDAKLQLSKDTYDDDLDNLLAQIGDQYADLFLAAKNLSDAILLSDILRVNTEITKAPLSASMIKRYDEHHQDLTLLKALVRQQLPEKYKEIFFDQSKNGYAGYIDGGASQEEFYKFIKPILEKMDGTEELLVKLNREDLLRKQRTFDNGSIPHQIHLGELHAILRRQEDFYPFLKDNREKIEKILTFRIPYYVGPLARGNSRFAWMTRKSEETITPWNFEEVVDKGASAQSFIERMTNFDKNLPNEKVLPKHSLLYEYFTVYNELTKVKYVTEGMRKPAFLSGEQKKAIVDLLFKTNRKVTVKQLKEDYFKKIECFDSVEISGVEDRFNASLGTYHDLLKIIKDKDFLDNEENEDILEDIVLTLTLFEDREMIEERLKTYAHLFDDKVMKQLKRRRYTGWGRLSRKLINGIRDKQSGKTILDFLKSDGFANRNFMQLIHDDSLTFKEDIQKAQVSGQGDSLHEHIANLAGSPAIKKGILQTVKVVDELVKVMGRHKPENIVIEMARENQTTQKGQKNSRERMKRIEEGIKELGSQILKEHPVENTQLQNEKLYLYYLQNGRDMYVDQELDINRLSDYDVDHIVPQSFLKDDSIDNKVLTRSDKARGKSDNVPSEEVVKKMKNYWRQLLNAKLITQRKFDNLTKAERGGLSELDKAGFIKRQLVETRQITKHVAQILDSRMNTKYDENDKLIREVKVITLKSKLVSDFRKDFQFYKVREINNYHHAHDAYLNAVVGTALIKKYPKLESEFVYGDYKVYDVRKMIAKSEQEIGKATAKYFFYSNIMNFFKTEITLANGEIRKRPLIETNGETGEIVWDKGRDFATVRKVLSMPQVNIVKKTEVQTGGFSKESILPKRNSDKLIARKKDWDPKKYGGFDSPTVAYSVLVVAKVEKGKSKKLKSVKELLGITIMERSSFEKNPIDFLEAKGYKEVKKDLIIKLPKYSLFELENGRKRMLASAGELQKGNELALPSKYVNFLYLASHYEKLKGSPEDNEQKQLFVEQHKHYLDEIIEQISEFSKRVILADANLDKVLSAYNKHRDKPIREQAENIIHLFTLTNLGAPAAFKYFDTTIDRKRYTSTKEVLDATLIHQSITGLYETRIDLSQLGGDGGEAAAKGGSGGGGGIPWLMKKPLQLTTLVPLQEYEERLLKQTMLTGSYKEKLQSLFLKYDALWQHWENQVGHRRIKPHHIATGTVNPRPQKQYPINPKAKASIQTVINDLLKQGVLIQQNSIMNTPVYPVPKPDGKWRMVLDYREVNKTIPLIAAQNQHSAGILSSIFRGKYKTTLDLSNGFWAHSITPESYWLTAFTWLGQQYCWTRLPQGFLNSPALFTADVVDLLKEVPNVQVYVDDIYISHDDPREHLEQLEKVFSLLLNAGYVVSLKKSEIAQHEVEFLGFNITKEGRGLTETFKQKLLNITPPRDLKQLQSILGLLNFARNFIPNFSELVKPLYNIIATANGKYITWTTDNSQQLQNIISMLNSAENLEERNPEVRLIMKVNTSPSAGYIRFYNEFAKRPIMYLNYVYTKAEVKFTNTEKLLTTIHKGLIKALDLGMGQEILVYSPIVSMTKIQKTPLPERKALPIRWITWMSYLEDPRIQFHYDKTLPELQQVPTVTDDIIAKIKHPSEFSMVFYTDGSAIKHPNVNKSHNAGMGIAQVQFKPEFTVINTWSIPLGDHTAQLAEVAAVEFACKKALKIDGPVLIVTDSFYVAESVNKELPYWQSNGFFNNKKKPLKHVSKWKSIADCIQLKPDIIIIHEKGHQPTASTFHTEGNNLADKLATQGSYVVNAGKRTADGSEFEKRTADGSEFESPKKKAKVE

SEQ ID NO: 6952 - protein, 2176 aa, synthetic construct
MPAAKRVKLDGGDKKYSIGLDIGTNSVGWAVITDEYKVPSKKFKVLGNTDRHSIKKNLIGALLFDSGETAEATRLKRTARRRYTRRKNRICYLQEIFSNEMAKVDDSFFHRLEESFLVEEDKKHERHPIFGNIVDEVAYHEKYPTIYHLRKKLVDSTDKADLRLIYLALAHMIKFRGHFLIEGDLNPDNSDVDKLFIQLVQTYNQLFEENPINASGVDAKAILSARLSKSRRLENLIAQLPGEKKNGLFGNLIALSLGLTPNFKSNFDLAEDAKLQLSKDTYDDDLDNLLAQIGDQYADLFLAAKNLSDAILLSDILRVNTEITKAPLSASMIKRYDEHHQDLTLLKALVRQQLPEKYKEIFFDQSKNGYAGYIDGGASQEEFYKFIKPILEKMDGTEELLVKLNREDLLRKQRTFDNGSIPHQIHLGELHAILRRQEDFYPFLKDNREKIEKILTFRIPYYVGPLARGNSRFAWMTRKSEETITPWNFEEVVDKGASAQSFIERMTNFDKNLPNEKVLPKHSLLYEYFTVYNELTKVKYVTEGMRKPAFLSGEQKKAIVDLLFKTNRKVTVKQLKEDYFKKIECFDSVEISGVEDRFNASLGTYHDLLKIIKDKDFLDNEENEDILEDIVLTLTLFEDREMIEERLKTYAHLFDDKVMKQLKRRRYTGWGRLSRKLINGIRDKQSGKTILDFLKSDGFANRNFMQLIHDDSLTFKEDIQKAQVSGQGDSLHEHIANLAGSPAIKKGILQTVKVVDELVKVMGRHKPENIVIEMARENQTTQKGQKNSRERMKRIEEGIKELGSQILKEHPVENTQLQNEKLYLYYLQNGRDMYVDQELDINRLSDYDVDHIVPQSFLKDDSIDNKVLTRSDKARGKSDNVPSEEVVKKMKNYWRQLLNAKLITQRKFDNLTKAERGGLSELDKAGFIKRQLVETRQITKHVAQILDSRMNTKYDENDKLIREVKVITLKSKLVSDFRKDFQFYKVREINNYHHAHDAYLNAVVGTALIKKYPKLESEFVYGDYKVYDVRKMIAKSEQEIGKATAKYFFYSNIMNFFKTEITLANGEIRKRPLIETNGETGEIVWDKGRDFATVRKVLSMPQVNIVKKTEVQTGGFSKESILPKRNSDKLIARKKDWDPKKYGGFDSPTVAYSVLVVAKVEKGKSKKLKSVKELLGITIMERSSFEKNPIDFLEAKGYKEVKKDLIIKLPKYSLFELENGRKRMLASAGELQKGNELALPSKYVNFLYLASHYEKLKGSPEDNEQKQLFVEQHKHYLDEIIEQISEFSKRVILADANLDKVLSAYNKHRDKPIREQAENIIHLFTLTNLGAPAAFKYFDTTIDRKRYTSTKEVLDATLIHQSITGLYETRIDLSQLGGDGGEAAAKGGSGGGGGMDPLQLLQPLEAEIKGTKLKAHWNSGATITCVPQAFLEEEVPIKNIWIKTIHGEKEQPVYYLTFKIQGRKVEAEVISSPYDYILVSPSDIPWLMKKPLQLTTLVPLQEYEERLLKQTMLTGSYKEKLQSLFLKYDALWQHWENQVGHRRIKPHHIATGTVNPRPQKQYPINPKAKASIQTVINDLLKQGVLIQQNSIMNTPVYPVPKPDGKWRMVLDYREVNKTIPLIAAQNQHSAGILSSIFRGKYKTTLDLSNGFWAHSITPESYWLTAFTWLGQQYCWTRLPQGFLNSPALFNADVVDLLKEVPNVQVYVDDIYISHDDPREHLEQLEKVFSLLLNAGYVVSLKKSEIAQHEVEFLGFNITKEGRGLTETFKQKLLNITPPRDLKQLQSILGKLNFARNFIPNFSELVKPLYNIIATAPGKYITWTTDNSQQLQNIISMLNSAENLEERNPEVRLIMKVNTSPSAGYIRFYNEFAKRPIMYLNYVYTKAEVKFTNTEKLLTTIHKGLIKALDLGMGQEILVYSPIVSMTKIQKTPLPERKALPIRWITWMSYLEDPRIQFHYDKTLPELQQVPTVTDDIIAKIKHPSEFSMVFYTDGSAIKHPNVNKSHNAGMGIAQVQFKPEFTVINTWSIPLGDHTAQLAEVAAVEFACKKALKIDGPVLIVTDSFYVAESVNKELPYWQSNGFFNNKKKPLKHVSKWKSIADCIQLKPDIIIIHEKGHQPTASTFHTEGNNLADKLATQGSYVVNAGKRTADGSEFEKRTADGSEFESPKKKAKVE

SEQ ID NO: 6953 - protein, 2094 aa, synthetic construct
MPAAKRVKLDGGDKKYSIGLDIGTNSVGWAVITDEYKVPSKKFKVLGNTDRHSIKKNLIGALLFDSGETAEATRLKRTARRRYTRRKNRICYLQEIFSNEMAKVDDSFFHRLEESFLVEEDKKHERHPIFGNIVDEVAYHEKYPTIYHLRKKLVDSTDKADLRLIYLALAHMIKFRGHFLIEGDLNPDNSDVDKLFIQLVQTYNQLFEENPINASGVDAKAILSARLSKSRRLENLIAQLPGEKKNGLFGNLIALSLGLTPNFKSNFDLAEDAKLQLSKDTYDDDLDNLLAQIGDQYADLFLAAKNLSDAILLSDILRVNTEITKAPLSASMIKRYDEHHQDLTLLKALVRQQLPEKYKEIFFDQSKNGYAGYIDGGASQEEFYKFIKPILEKMDGTEELLVKLNREDLLRKQRTFDNGSIPHQIHLGELHAILRRQEDFYPFLKDNREKIEKILTFRIPYYVGPLARGNSRFAWMTRKSEETITPWNFEEVVDKGASAQSFIERMTNFDKNLPNEKVLPKHSLLYEYFTVYNELTKVKYVTEGMRKPAFLSGEQKKAIVDLLFKTNRKVTVKQLKEDYFKKIECFDSVEISGVEDRFNASLGTYHDLLKIIKDKDFLDNEENEDILEDIVLTLTLFEDREMIEERLKTYAHLFDDKVMKQLKRRRYTGWGRLSRKLINGIRDKQSGKTILDFLKSDGFANRNFMQLIHDDSLTFKEDIQKAQVSGQGDSLHEHIANLAGSPAIKKGILQTVKVVDELVKVMGRHKPENIVIEMARENQTTQKGQKNSRERMKRIEEGIKELGSQILKEHPVENTQLQNEKLYLYYLQNGRDMYVDQELDINRLSDYDVDHIVPQSFLKDDSIDNKVLTRSDKARGKSDNVPSEEVVKKMKNYWRQLLNAKLITQRKFDNLTKAERGGLSELDKAGFIKRQLVETRQITKHVAQILDSRMNTKYDENDKLIREVKVITLKSKLVSDFRKDFQFYKVREINNYHHAHDAYLNAVVGTALIKKYPKLESEFVYGDYKVYDVRKMIAKSEQEIGKATAKYFFYSNIMNFFKTEITLANGEIRKRPLIETNGETGEIVWDKGRDFATVRKVLSMPQVNIVKKTEVQTGGFSKESILPKRNSDKLIARKKDWDPKKYGGFDSPTVAYSVLVVAKVEKGKSKKLKSVKELLGITIMERSSFEKNPIDFLEAKGYKEVKKDLIIKLPKYSLFELENGRKRMLASAGELQKGNELALPSKYVNFLYLASHYEKLKGSPEDNEQKQLFVEQHKHYLDEIIEQISEFSKRVILADANLDKVLSAYNKHRDKPIREQAENIIHLFTLTNLGAPAAFKYFDTTIDRKRYTSTKEVLDATLIHQSITGLYETRIDLSQLGGDGGEAAAKGGSGGGGGVLNLEEEYRLHEKPVPSSIDPSWLQLFPTVWAERAGMGLANQVPPVVVELRSGASPVAVRQYPMSKEAREGIRPHIQRFLDLGVLVPCQSPWNTPLLPVKKPGTNDYRPVQDLREINKRVQDIHPTVPNPYNLLSSLPPSHTWYSVLDLKDAFFCLKLHPNSQPLFAFEWRDPEKGNTGQLTWTRLPQGFKNSPTLFNEALHRDLAPFRALNPQVVLLQYVDDLLVAAPTYRDCKEGTQKLLQELSKLGYRVSAKKAQLCQKEVTYLGYLLKEGKRWLTPARKATVMKIPPPTTPRQVREFLGTAGFCRLWIPGFASLAAPLYPLTKPSIPFIWTEEHQKAFDRIKEALLSAPALALPDLTKPFTLYVDERAGVARGVLTQTLGPWRRPVAYLSKKLDPVASGWPTCLKAVAAVALLLKDADKLTLGQNVTVIASHSLESIVRQPPDRWMTNARMTHYQSLLLNERVSFAPPAVLNPATLLPVESEATPVHRCSEILAEETGTRRDLKDQPLPGVPAWYTDGSSFIAEGKRRAGAAIVDGKRTVWASSLPEGTSAQKAELVALTQALRLAEGKDINIYTDSRYAFATAHIHGAIYKQRGWLTSAGKDIKNKEEILALLEAIHLPKRVAIIHCPGHQKGNDPVATGNRRADEAAKQAALSTRVLAETTKPAGKRTADGSEFEKRTADGSEFESPKKKAKVE

SEQ ID NO: 6954 - protein, 2094 aa, synthetic construct
MPAAKRVKLDGGDKKYSIGLDIGTNSVGWAVITDEYKVPSKKFKVLGNTDRHSIKKNLIGALLFDSGETAEATRLKRTARRRYTRRKNRICYLQEIFSNEMAKVDDSFFHRLEESFLVEEDKKHERHPIFGNIVDEVAYHEKYPTIYHLRKKLVDSTDKADLRLIYLALAHMIKFRGHFLIEGDLNPDNSDVDKLFIQLVQTYNQLFEENPINASGVDAKAILSARLSKSRRLENLIAQLPGEKKNGLFGNLIALSLGLTPNFKSNFDLAEDAKLQLSKDTYDDDLDNLLAQIGDQYADLFLAAKNLSDAILLSDILRVNTEITKAPLSASMIKRYDEHHQDLTLLKALVRQQLPEKYKEIFFDQSKNGYAGYIDGGASQEEFYKFIKPILEKMDGTEELLVKLNREDLLRKQRTFDNGSIPHQIHLGELHAILRRQEDFYPFLKDNREKIEKILTFRIPYYVGPLARGNSRFAWMTRKSEETITPWNFEEVVDKGASAQSFIERMTNFDKNLPNEKVLPKHSLLYEYFTVYNELTKVKYVTEGMRKPAFLSGEQKKAIVDLLFKTNRKVTVKQLKEDYFKKIECFDSVEISGVEDRFNASLGTYHDLLKIIKDKDFLDNEENEDILEDIVLTLTLFEDREMIEERLKTYAHLFDDKVMKQLKRRRYTGWGRLSRKLINGIRDKQSGKTILDFLKSDGFANRNFMQLIHDDSLTFKEDIQKAQVSGQGDSLHEHIANLAGSPAIKKGILQTVKVVDELVKVMGRHKPENIVIEMARENQTTQKGQKNSRERMKRIEEGIKELGSQILKEHPVENTQLQNEKLYLYYLQNGRDMYVDQELDINRLSDYDVDHIVPQSFLKDDSIDNKVLTRSDKARGKSDNVPSEEVVKKMKNYWRQLLNAKLITQRKFDNLTKAERGGLSELDKAGFIKRQLVETRQITKHVAQILDSRMNTKYDENDKLIREVKVITLKSKLVSDFRKDFQFYKVREINNYHHAHDAYLNAVVGTALIKKYPKLESEFVYGDYKVYDVRKMIAKSEQEIGKATAKYFFYSNIMNFFKTEITLANGEIRKRPLIETNGETGEIVWDKGRDFATVRKVLSMPQVNIVKKTEVQTGGFSKESILPKRNSDKLIARKKDWDPKKYGGFDSPTVAYSVLVVAKVEKGKSKKLKSVKELLGITIMERSSFEKNPIDFLEAKGYKEVKKDLIIKLPKYSLFELENGRKRMLASAGELQKGNELALPSKYVNFLYLASHYEKLKGSPEDNEQKQLFVEQHKHYLDEIIEQISEFSKRVILADANLDKVLSAYNKHRDKPIREQAENIIHLFTLTNLGAPAAFKYFDTTIDRKRYTSTKEVLDATLIHQSITGLYETRIDLSQLGGDGGEAAAKGGSGGGGGVLNLEEEYRLHEKPVPSSIDPSWLQLFPTVWAERAGMGLANQVPPVVVELRSGASPVAVRQYPMSKEAREGIRPHIQRFLDLGVLVPCQSPWNTPLLPVKKPGTNDYRPVQDLREINKRVQDIHPTVPNPYNLLSSLPPSHTWYSVLDLKDAFFCLKLHPNSQPLFAFEWRDPEKGNTGQLTWTRLPQGFKNSPTLFNEALHRDLAPFRALNPQVVLLQYVDDLLVAAPTYRDCKEGTQKLLQELSKLGYRVSAKKAQLCQKEVTYLGYLLKEGKRWLTPARKATVMKIPPPTTPRQVREFLGKAGFCRLFIPGFASLAAPLYPLTKPSIPFIWTEEHQKAFDRIKEALLSAPALALPDLTKPFTLYVDERAGVARGVLTQTLGPWRRPVAYLSKKLDPVASGWPTCLKAVAAVALLLKDADKLTLGQNVTVIASHSLESIVRQPPDRWMTNARMTHYQSLLLNERVSFAPPAVLNPATLLPVESEATPVHRCSEILAEETGTRRDLKDQPLPGVPAWYTDGSSFIAEGKRRAGAAIVDGKRTVWASSLPEGTSAQKAELVALTQALRLAEGKDINIYTDSRYAFATAHIHGAIYKQRGWLTSAGKDIKNKEEILALLEAIHLPKRVAIIHCPGHQKGNDPVATGNRRADEAAKQAALSTRVLAETTKPAGKRTADGSEFEKRTADGSEFESPKKKAKVE

SEQ ID NO: 6955 - protein, 2096 aa, synthetic construct
MPAAKRVKLDGGDKKYSIGLDIGTNSVGWAVITDEYKVPSKKFKVLGNTDRHSIKKNLIGALLFDSGETAEATRLKRTARRRYTRRKNRICYLQEIFSNEMAKVDDSFFHRLEESFLVEEDKKHERHPIFGNIVDEVAYHEKYPTIYHLRKKLVDSTDKADLRLIYLALAHMIKFRGHFLIEGDLNPDNSDVDKLFIQLVQTYNQLFEENPINASGVDAKAILSARLSKSRRLENLIAQLPGEKKNGLFGNLIALSLGLTPNFKSNFDLAEDAKLQLSKDTYDDDLDNLLAQIGDQYADLFLAAKNLSDAILLSDILRVNTEITKAPLSASMIKRYDEHHQDLTLLKALVRQQLPEKYKEIFFDQSKNGYAGYIDGGASQEEFYKFIKPILEKMDGTEELLVKLNREDLLRKQRTFDNGSIPHQIHLGELHAILRRQEDFYPFLKDNREKIEKILTFRIPYYVGPLARGNSRFAWMTRKSEETITPWNFEEVVDKGASAQSFIERMTNFDKNLPNEKVLPKHSLLYEYFTVYNELTKVKYVTEGMRKPAFLSGEQKKAIVDLLFKTNRKVTVKQLKEDYFKKIECFDSVEISGVEDRFNASLGTYHDLLKIIKDKDFLDNEENEDILEDIVLTLTLFEDREMIEERLKTYAHLFDDKVMKQLKRRRYTGWGRLSRKLINGIRDKQSGKTILDFLKSDGFANRNFMQLIHDDSLTFKEDIQKAQVSGQGDSLHEHIANLAGSPAIKKGILQTVKVVDELVKVMGRHKPENIVIEMARENQTTQKGQKNSRERMKRIEEGIKELGSQILKEHPVENTQLQNEKLYLYYLQNGRDMYVDQELDINRLSDYDVDHIVPQSFLKDDSIDNKVLTRSDKARGKSDNVPSEEVVKKMKNYWRQLLNAKLITQRKFDNLTKAERGGLSELDKAGFIKRQLVETRQITKHVAQILDSRMNTKYDENDKLIREVKVITLKSKLVSDFRKDFQFYKVREINNYHHAHDAYLNAVVGTALIKKYPKLESEFVYGDYKVYDVRKMIAKSEQEIGKATAKYFFYSNIMNFFKTEITLANGEIRKRPLIETNGETGEIVWDKGRDFATVRKVLSMPQVNIVKKTEVQTGGFSKESILPKRNSDKLIARKKDWDPKKYGGFDSPTVAYSVLVVAKVEKGKSKKLKSVKELLGITIMERSSFEKNPIDFLEAKGYKEVKKDLIIKLPKYSLFELENGRKRMLASAGELQKGNELALPSKYVNFLYLASHYEKLKGSPEDNEQKQLFVEQHKHYLDEIIEQISEFSKRVILADANLDKVLSAYNKHRDKPIREQAENIIHLFTLTNLGAPAAFKYFDTTIDRKRYTSTKEVLDATLIHQSITGLYETRIDLSQLGGDGGEAAAKGGSGGGGGTLNIEDEYRLHETSKEPDVPLGSTWLSDFPQAWAETGGMGLAVRQAPLIIPLKATSTPVSIKQYPMSQEARLGIKPHIQRLLDQGILVPCQSPWNTPLLPVKKPGTNDYRPVQDLREVNKRVEDIHPTVPNPYNLLSGLPPSHQWYTVLDLKDAFFCLRLHPTSQPLFAFEWRDPEMGISGQLTWTRLPQGFKNSPTLFDEALHRDLADFRIQHPDLILLQYVDDLLLAATSEQDCQRGTRALLQTLGNLGYRASAKKAQICQKQVKYLGYLLKEGQRWLTEARKETVMGQPTPKTPRQLREFLGTAGFCRLWIPGFAEMAAPLYPLTKTGTLFNWGPDQQKAYQEIKQALLTAPALGLPDLTKPFELFVDEKQGYAKGVLTQKLGPWRRPVAYLSKKLDPVAAGWPPCLRMVAAIAVLTKDAGKLTMGQPLVILAPHAVEALVKQPPDRWLSNARMTHYQAMLLDTDRVQFGPVVALNPATLLPLPEKEAPHDCLEILAETHGTRPDLTDQPIPDADYTWYTDGSSFLQEGQRRAGAAVTTETEVIWARALPAGTSAQRAELIALTQALKMAEGKKLNVYTDSRYAFATAHVHGEIYRRRGLLTSEGREIKNKNEILALLKALFLPKRLSIIHCPGHQKGNSAEARGNRMADQAAREAAMKAVLETSTLLAGKRTADGSEFEKRTADGSEFESPKKKAKVE

SEQ ID NO: 6956 - protein, 2096 aa, synthetic construct
MPAAKRVKLDGGDKKYSIGLDIGTNSVGWAVITDEYKVPSKKFKVLGNTDRHSIKKNLIGALLFDSGETAEATRLKRTARRRYTRRKNRICYLQEIFSNEMAKVDDSFFHRLEESFLVEEDKKHERHPIFGNIVDEVAYHEKYPTIYHLRKKLVDSTDKADLRLIYLALAHMIKFRGHFLIEGDLNPDNSDVDKLFIQLVQTYNQLFEENPINASGVDAKAILSARLSKSRRLENLIAQLPGEKKNGLFGNLIALSLGLTPNFKSNFDLAEDAKLQLSKDTYDDDLDNLLAQIGDQYADLFLAAKNLSDAILLSDILRVNTEITKAPLSASMIKRYDEHHQDLTLLKALVRQQLPEKYKEIFFDQSKNGYAGYIDGGASQEEFYKFIKPILEKMDGTEELLVKLNREDLLRKQRTFDNGSIPHQIHLGELHAILRRQEDFYPFLKDNREKIEKILTFRIPYYVGPLARGNSRFAWMTRKSEETITPWNFEEVVDKGASAQSFIERMTNFDKNLPNEKVLPKHSLLYEYFTVYNELTKVKYVTEGMRKPAFLSGEQKKAIVDLLFKTNRKVTVKQLKEDYFKKIECFDSVEISGVEDRFNASLGTYHDLLKIIKDKDFLDNEENEDILEDIVLTLTLFEDREMIEERLKTYAHLFDDKVMKQLKRRRYTGWGRLSRKLINGIRDKQSGKTILDFLKSDGFANRNFMQLIHDDSLTFKEDIQKAQVSGQGDSLHEHIANLAGSPAIKKGILQTVKVVDELVKVMGRHKPENIVIEMARENQTTQKGQKNSRERMKRIEEGIKELGSQILKEHPVENTQLQNEKLYLYYLQNGRDMYVDQELDINRLSDYDVDHIVPQSFLKDDSIDNKVLTRSDKARGKSDNVPSEEVVKKMKNYWRQLLNAKLITQRKFDNLTKAERGGLSELDKAGFIKRQLVETRQITKHVAQILDSRMNTKYDENDKLIREVKVITLKSKLVSDFRKDFQFYKVREINNYHHAHDAYLNAVVGTALIKKYPKLESEFVYGDYKVYDVRKMIAKSEQEIGKATAKYFFYSNIMNFFKTEITLANGEIRKRPLIETNGETGEIVWDKGRDFATVRKVLSMPQVNIVKKTEVQTGGFSKESILPKRNSDKLIARKKDWDPKKYGGFDSPTVAYSVLVVAKVEKGKSKKLKSVKELLGITIMERSSFEKNPIDFLEAKGYKEVKKDLIIKLPKYSLFELENGRKRMLASAGELQKGNELALPSKYVNFLYLASHYEKLKGSPEDNEQKQLFVEQHKHYLDEIIEQISEFSKRVILADANLDKVLSAYNKHRDKPIREQAENIIHLFTLTNLGAPAAFKYFDTTIDRKRYTSTKEVLDATLIHQSITGLYETRIDLSQLGGDGGEAAAKGGSGGGGGTLNIEDEYRLHETSKEPDVPLGSTWLSDFPQAWAETGGMGLAVRQAPLIIPLKATSTPVSIKQYPMSQEARLGIKPHIQRLLDQGILVPCQSPWNTPLLPVKKPGTNDYRPVQDLREVNKRVEDIHPTVPNPYNLLSGLPPSHQWYTVLDLKDAFFCLRLHPTSQPLFAFEWRDPEMGISGQLTWTRLPQGFKNSPTLFNEALHRDLADFRIQHPDLILLQYVDDLLLAATSEQDCQRGTRALLQTLGNLGYRASAKKAQICQKQVKYLGYLLKEGQRWLTEARKETVMGQPTPKTPRQLREFLGTAGFCRLWIPGFAEMAAPLYPLTKPGTLFNWGPDQQKAYQEIKQALLTAPALGLPDLTKPFELFVDEKQGYAKGVLTQKLGPWRRPVAYLSKKLDPVAAGWPPCLRMVAAIAVLTKDAGKLTMGQPLVILAPHAVEALVKQPPDRWLSNARMTHYQAMLLDTDRVQFGPVVALNPATLLPLPEKEAPHDCLEILAETHGTRPDLTDQPIPDADYTWYTDGSSFLQEGQRRAGAAVTTETEVIWARALPAGTSAQRAELIALTQALKMAEGKKLNVYTDSRYAFATAHVHGEIYRRRGWLTSEGREIKNKNEILALLKALFLPKRLSIIHCPGHQKGNSAEARGNRMADQAAREAAMKAVLETSTLLAGKRTADGSEFEKRTADGSEFESPKKKAKVE

SEQ ID NO: 6957 - protein, 2102 aa, synthetic construct
MPAAKRVKLDGGDKKYSIGLDIGTNSVGWAVITDEYKVPSKKFKVLGNTDRHSIKKNLIGALLFDSGETAEATRLKRTARRRYTRRKNRICYLQEIFSNEMAKVDDSFFHRLEESFLVEEDKKHERHPIFGNIVDEVAYHEKYPTIYHLRKKLVDSTDKADLRLIYLALAHMIKFRGHFLIEGDLNPDNSDVDKLFIQLVQTYNQLFEENPINASGVDAKAILSARLSKSRRLENLIAQLPGEKKNGLFGNLIALSLGLTPNFKSNFDLAEDAKLQLSKDTYDDDLDNLLAQIGDQYADLFLAAKNLSDAILLSDILRVNTEITKAPLSASMIKRYDEHHQDLTLLKALVRQQLPEKYKEIFFDQSKNGYAGYIDGGASQEEFYKFIKPILEKMDGTEELLVKLNREDLLRKQRTFDNGSIPHQIHLGELHAILRRQEDFYPFLKDNREKIEKILTFRIPYYVGPLARGNSRFAWMTRKSEETITPWNFEEVVDKGASAQSFIERMTNFDKNLPNEKVLPKHSLLYEYFTVYNELTKVKYVTEGMRKPAFLSGEQKKAIVDLLFKTNRKVTVKQLKEDYFKKIECFDSVEISGVEDRFNASLGTYHDLLKIIKDKDFLDNEENEDILEDIVLTLTLFEDREMIEERLKTYAHLFDDKVMKQLKRRRYTGWGRLSRKLINGIRDKQSGKTILDFLKSDGFANRNFMQLIHDDSLTFKEDIQKAQVSGQGDSLHEHIANLAGSPAIKKGILQTVKVVDELVKVMGRHKPENIVIEMARENQTTQKGQKNSRERMKRIEEGIKELGSQILKEHPVENTQLQNEKLYLYYLQNGRDMYVDQELDINRLSDYDVDHIVPQSFLKDDSIDNKVLTRSDKARGKSDNVPSEEVVKKMKNYWRQLLNAKLITQRKFDNLTKAERGGLSELDKAGFIKRQLVETRQITKHVAQILDSRMNTKYDENDKLIREVKVITLKSKLVSDFRKDFQFYKVREINNYHHAHDAYLNAVVGTALIKKYPKLESEFVYGDYKVYDVRKMIAKSEQEIGKATAKYFFYSNIMNFFKTEITLANGEIRKRPLIETNGETGEIVWDKGRDFATVRKVLSMPQVNIVKKTEVQTGGFSKESILPKRNSDKLIARKKDWDPKKYGGFDSPTVAYSVLVVAKVEKGKSKKLKSVKELLGITIMERSSFEKNPIDFLEAKGYKEVKKDLIIKLPKYSLFELENGRKRMLASAGELQKGNELALPSKYVNFLYLASHYEKLKGSPEDNEQKQLFVEQHKHYLDEIIEQISEFSKRVILADANLDKVLSAYNKHRDKPIREQAENIIHLFTLTNLGAPAAFKYFDTTIDRKRYTSTKEVLDATLIHQSITGLYETRIDLSQLGGDGGEAAAKGGGGGSGGTVSLQDEHRLFDIPVTTSLPDVWLQDFPQAWAETGGLGRAKCQAPIIIDLKPTAVPVSIKQYPMSLEAHMGIRQHIIKFLELGVLRPCRSPWNTPLLPVKKPGTQDYRPVQDLREINKRTVDIHPTVPNPYNLLSTLKPDYSWYTVLDLKDAFFCLPLAPQSQELFAFEWKDPERGISGQLTWTRLPQGFKNSPTLFNEALHRDLTDFRTQHPEVTLLQYVDDLLLAAPTKKACTQGTRHLLQELGEKGYRASAKKAQICQTKVTYLGYILSEGKRWLTPGRIETVARIPPPRNPREVREFLGKAGFCRLFIPGFAELAAPLYALTKPSTPFTWQTEHQLAFEALKKALLSAPALGLPDTSKPFTLFLDERQGIAKGVLTQKLGPWKRPVAYLSKKLDPVAAGWPPCLRIMAATAMLVKDSAKLTLGQPLTVITPHTLEAIVRQPPDRWITNARLTHYQALLLDTDRVQFGPPVTLNPATLLPVPENQPSPHDCRQVLAETHGTREDLKDQELPDADHTWYTDGSSYLDSGTRRAGAAVVDGHNTIWAQSLPPGTSAQKAELIALTKALELSKGKKANIYTDSRYAFATAHTHGSIYERRGWLTSEGKEIKNKAEIIALLKALFLPQEVAIIHCPGHQKGQDPVAVGNRQADRVARQAAMAEVLTLATEPDNTSHITAGKRTADGSEFEKRTADGSEFESPKKKAKVE

SEQ ID NO: 6958 - protein, 2095 aa, synthetic construct
MPAAKRVKLDGGDKKYSIGLDIGTNSVGWAVITDEYKVPSKKFKVLGNTDRHSIKKNLIGALLFDSGETAEATRLKRTARRRYTRRKNRICYLQEIFSNEMAKVDDSFFHRLEESFLVEEDKKHERHPIFGNIVDEVAYHEKYPTIYHLRKKLVDSTDKADLRLIYLALAHMIKFRGHFLIEGDLNPDNSDVDKLFIQLVQTYNQLFEENPINASGVDAKAILSARLSKSRRLENLIAQLPGEKKNGLFGNLIALSLGLTPNFKSNFDLAEDAKLQLSKDTYDDDLDNLLAQIGDQYADLFLAAKNLSDAILLSDILRVNTEITKAPLSASMIKRYDEHHQDLTLLKALVRQQLPEKYKEIFFDQSKNGYAGYIDGGASQEEFYKFIKPILEKMDGTEELLVKLNREDLLRKQRTFDNGSIPHQIHLGELHAILRRQEDFYPFLKDNREKIEKILTFRIPYYVGPLARGNSRFAWMTRKSEETITPWNFEEVVDKGASAQSFIERMTNFDKNLPNEKVLPKHSLLYEYFTVYNELTKVKYVTEGMRKPAFLSGEQKKAIVDLLFKTNRKVTVKQLKEDYFKKIECFDSVEISGVEDRFNASLGTYHDLLKIIKDKDFLDNEENEDILEDIVLTLTLFEDREMIEERLKTYAHLFDDKVMKQLKRRRYTGWGRLSRKLINGIRDKQSGKTILDFLKSDGFANRNFMQLIHDDSLTFKEDIQKAQVSGQGDSLHEHIANLAGSPAIKKGILQTVKVVDELVKVMGRHKPENIVIEMARENQTTQKGQKNSRERMKRIEEGIKELGSQILKEHPVENTQLQNEKLYLYYLQNGRDMYVDQELDINRLSDYDVDHIVPQSFLKDDSIDNKVLTRSDKARGKSDNVPSEEVVKKMKNYWRQLLNAKLITQRKFDNLTKAERGGLSELDKAGFIKRQLVETRQITKHVAQILDSRMNTKYDENDKLIREVKVITLKSKLVSDFRKDFQFYKVREINNYHHAHDAYLNAVVGTALIKKYPKLESEFVYGDYKVYDVRKMIAKSEQEIGKATAKYFFYSNIMNFFKTEITLANGEIRKRPLIETNGETGEIVWDKGRDFATVRKVLSMPQVNIVKKTEVQTGGFSKESILPKRNSDKLIARKKDWDPKKYGGFDSPTVAYSVLVVAKVEKGKSKKLKSVKELLGITIMERSSFEKNPIDFLEAKGYKEVKKDLIIKLPKYSLFELENGRKRMLASAGELQKGNELALPSKYVNFLYLASHYEKLKGSPEDNEQKQLFVEQHKHYLDEIIEQISEFSKRVILADANLDKVLSAYNKHRDKPIREQAENIIHLFTLTNLGAPAAFKYFDTTIDRKRYTSTKEVLDATLIHQSITGLYETRIDLSQLGGDGGEAAAKGGGGGSGGTLQLEEEYRLFEPESTQKQEMDIWLKNFPQAWAETGGMGTAHCQAPVLIQLKATATPISIRQYPMPHEAYQGIKPHIRRMLDQGILKPCQSPWNTPLLPVKKPGTEDYRPVQDLREVNKRVEDIHPTVPNPYNLLSTLPPSHPWYTVLDLKDAFFCLRLHSESQLLFAFEWRDPEIGLSGQLTWTRLPQGFKNSPTLFNEALHSDLADFRVRYPALVLLQYVDDLLLAAATRTECLEGTKALLETLGNKGYRASAKKAQICLQEVTYLGYSLKDGQRWLTKARKEAILSIPVPKNSRQVREFLGTAGYCRLWIPGFAELAAPLYPLTRPGTLFQWGTEQQLAFEDIKKALLSSPALGLPDITKPFELFIDENSGFAKGVLVQKLGPWKRPVAYLSKKLDTVASGWPPCLRMVAAIAILVKDAGKLTLGQPLTILTSHPVEALVRQPPNKWLSNARMTHYQAMLLDAERVHFGPTVSLNPATLLPLPSGGNHHDCLQILAETHGTRPDLTDQPLPDADLTWYTDGSSFIRNGEREAGAAVTTESEVIWAAPLPPGTSAQRAELIALTQALKMAEGKKLTVYTDSRYAFATTHVHGEIYRRRGWLTSEGKEIKNKNEILALLEALFLPKRLSIIHCPGHQKGDSPQAKGNRLADDTAKKAATETHSSLTVLPAGKRTADGSEFEKRTADGSEFESPKKKAKVE

SEQ ID NO: 6959 - protein, 2087 aa, synthetic construct
MPAAKRVKLDGGDKKYSIGLDIGTNSVGWAVITDEYKVPSKKFKVLGNTDRHSIKKNLIGALLFDSGETAEATRLKRTARRRYTRRKNRICYLQEIFSNEMAKVDDSFFHRLEESFLVEEDKKHERHPIFGNIVDEVAYHEKYPTIYHLRKKLVDSTDKADLRLIYLALAHMIKFRGHFLIEGDLNPDNSDVDKLFIQLVQTYNQLFEENPINASGVDAKAILSARLSKSRRLENLIAQLPGEKKNGLFGNLIALSLGLTPNFKSNFDLAEDAKLQLSKDTYDDDLDNLLAQIGDQYADLFLAAKNLSDAILLSDILRVNTEITKAPLSASMIKRYDEHHQDLTLLKALVRQQLPEKYKEIFFDQSKNGYAGYIDGGASQEEFYKFIKPILEKMDGTEELLVKLNREDLLRKQRTFDNGSIPHQIHLGELHAILRRQEDFYPFLKDNREKIEKILTFRIPYYVGPLARGNSRFAWMTRKSEETITPWNFEEVVDKGASAQSFIERMTNFDKNLPNEKVLPKHSLLYEYFTVYNELTKVKYVTEGMRKPAFLSGEQKKAIVDLLFKTNRKVTVKQLKEDYFKKIECFDSVEISGVEDRFNASLGTYHDLLKIIKDKDFLDNEENEDILEDIVLTLTLFEDREMIEERLKTYAHLFDDKVMKQLKRRRYTGWGRLSRKLINGIRDKQSGKTILDFLKSDGFANRNFMQLIHDDSLTFKEDIQKAQVSGQGDSLHEHIANLAGSPAIKKGILQTVKVVDELVKVMGRHKPENIVIEMARENQTTQKGQKNSRERMKRIEEGIKELGSQILKEHPVENTQLQNEKLYLYYLQNGRDMYVDQELDINRLSDYDVDHIVPQSFLKDDSIDNKVLTRSDKARGKSDNVPSEEVVKKMKNYWRQLLNAKLITQRKFDNLTKAERGGLSELDKAGFIKRQLVETRQITKHVAQILDSRMNTKYDENDKLIREVKVITLKSKLVSDFRKDFQFYKVREINNYHHAHDAYLNAVVGTALIKKYPKLESEFVYGDYKVYDVRKMIAKSEQEIGKATAKYFFYSNIMNFFKTEITLANGEIRKRPLIETNGETGEIVWDKGRDFATVRKVLSMPQVNIVKKTEVQTGGFSKESILPKRNSDKLIARKKDWDPKKYGGFDSPTVAYSVLVVAKVEKGKSKKLKSVKELLGITIMERSSFEKNPIDFLEAKGYKEVKKDLIIKLPKYSLFELENGRKRMLASAGELQKGNELALPSKYVNFLYLASHYEKLKGSPEDNEQKQLFVEQHKHYLDEIIEQISEFSKRVILADANLDKVLSAYNKHRDKPIREQAENIIHLFTLTNLGAPAAFKYFDTTIDRKRYTSTKEVLDATLIHQSITGLYETRIDLSQLGGDGGEAAAKGGGGGSGGVPWLTQQPLQLTILVPLQEYQEKILSKTALPEDQKQQLKTLFVKYDNLWQHWENQVGHRKIRPHNIATGDYPPRPQKQYPINPKAKPSIQIVIDDLLKQGVLTPQNSTMNTPVYPVPKPDGRWRMVLDYREVNKTIPLTAAQNQHSAGILATIVRQKYKTTLDLANGFWAHPITPESYWLTAFTWQGKQYCWTRLPQGFLNSPALFNADVVDLLKEIPNVQVYVDDIYLSHDDPKEHVQQLEKVFQILLQAGYVVSLKKSEIGQKTVEFLGFNITKEGRGLTDTFKTKLLNITPPKDLKQLQSILGKLNFARNFIPNFAELVQPLYNLIAPAKGKYIEWSEENTKQLNMVIEALNTASNLEERLPEQRLVIKVNTSPSAGYVRYYNETGKKPIMYLNYVFSKAELKFSMLEKLLTTMHKALIKAMDLAMGQEILVYSPIVSMTKIQKTPLPERKALPIRWITWMTYLEDPRIQFHYDKTLPELKHIPDVYTSSQSPVKHPSQYEGVFYTDGSAIKSPDPTKSNNAGMGIVHATYKPEYQVLNQWSIPLGNHTAQMAEIAAVEFACKKALKIPGPVLVITDSFYVAESANKELPYWKSNGFVNNKKKPLKHISKWKSIAECLSMKPDITIQHEKGISLQIPVFILKGNALADKLATQGSYVVNAGKRTADGSEFEKRTADGSEFESPKKKAKVE

SEQ ID NO: 6960 - protein, 2218 aa, synthetic construct
MPAAKRVKLDGGDKKYSIGLDIGTNSVGWAVITDEYKVPSKKFKVLGNTDRHSIKKNLIGALLFDSGETAEATRLKRTARRRYTRRKNRICYLQEIFSNEMAKVDDSFFHRLEESFLVEEDKKHERHPIFGNIVDEVAYHEKYPTIYHLRKKLVDSTDKADLRLIYLALAHMIKFRGHFLIEGDLNPDNSDVDKLFIQLVQTYNQLFEENPINASGVDAKAILSARLSKSRRLENLIAQLPGEKKNGLFGNLIALSLGLTPNFKSNFDLAEDAKLQLSKDTYDDDLDNLLAQIGDQYADLFLAAKNLSDAILLSDILRVNTEITKAPLSASMIKRYDEHHQDLTLLKALVRQQLPEKYKEIFFDQSKNGYAGYIDGGASQEEFYKFIKPILEKMDGTEELLVKLNREDLLRKQRTFDNGSIPHQIHLGELHAILRRQEDFYPFLKDNREKIEKILTFRIPYYVGPLARGNSRFAWMTRKSEETITPWNFEEVVDKGASAQSFIERMTNFDKNLPNEKVLPKHSLLYEYFTVYNELTKVKYVTEGMRKPAFLSGEQKKAIVDLLFKTNRKVTVKQLKEDYFKKIECFDSVEISGVEDRFNASLGTYHDLLKIIKDKDFLDNEENEDILEDIVLTLTLFEDREMIEERLKTYAHLFDDKVMKQLKRRRYTGWGRLSRKLINGIRDKQSGKTILDFLKSDGFANRNFMQLIHDDSLTFKEDIQKAQVSGQGDSLHEHIANLAGSPAIKKGILQTVKVVDELVKVMGRHKPENIVIEMARENQTTQKGQKNSRERMKRIEEGIKELGSQILKEHPVENTQLQNEKLYLYYLQNGRDMYVDQELDINRLSDYDVDHIVPQSFLKDDSIDNKVLTRSDKARGKSDNVPSEEVVKKMKNYWRQLLNAKLITQRKFDNLTKAERGGLSELDKAGFIKRQLVETRQITKHVAQILDSRMNTKYDENDKLIREVKVITLKSKLVSDFRKDFQFYKVREINNYHHAHDAYLNAVVGTALIKKYPKLESEFVYGDYKVYDVRKMIAKSEQEIGKATAKYFFYSNIMNFFKTEITLANGEIRKRPLIETNGETGEIVWDKGRDFATVRKVLSMPQVNIVKKTEVQTGGFSKESILPKRNSDKLIARKKDWDPKKYGGFDSPTVAYSVLVVAKVEKGKSKKLKSVKELLGITIMERSSFEKNPIDFLEAKGYKEVKKDLIIKLPKYSLFELENGRKRMLASAGELQKGNELALPSKYVNFLYLASHYEKLKGSPEDNEQKQLFVEQHKHYLDEIIEQISEFSKRVILADANLDKVLSAYNKHRDKPIREQAENIIHLFTLTNLGAPAAFKYFDTTIDRKRYTSTKEVLDATLIHQSITGLYETRIDLSQLGGDGGEAAAKGGGGGSGGTLGDQGSRGSDPLPEPRVTLTVEGIPTEFLVNTGAEHSVLTKPMGKMGSKRTVVAGATGSKVYPWTTKRLLKIGQKQVTHSFLVIPECPAPLLGRDLLTKLKAQIQFSTEGPQVTWEDRPAMCLVLNLEEEYRLHEKPVPPSIDPSWLQLFPMVWAEKAGMGLANQVPPVVVELKSDASPVAVRQYPMSKEAREGIRPHIQRFLDLGILVPCQSPWNTPLLPVKKPGTNDYRPVQDLREVNKRVQDIHPTVPNPYNLLSSLPPSHTWYSVLDLKDAFFCLKLHPNSQPLFAFEWRDPEKGNTGQLTWTRLPQGFKNSPTLFDEALHRDLASFRALNPQVVMLQYVDDLLVAAPTYRDCKEGTRRLLQELSKLGYRVSAKKAQLCREEVTYLGYLLKGGKRWLTPARKATVMKIPTPTTPRQVREFLGTAGFCRLWIPGFASLAAPLYPLTREKVPFTWTEAHQEAFGRIKEALLSAPALALPDLTKPFALYVDEKEGVARGVLTQTLGPWRRPVAYLSKKLDPVASGWPTCLKAIAAVALLLKDADKLTLGQNVLVIAPHNLESIVRQPPDRWMTNARMTHYQSLLLNERVSFAPPAILNPATLLPVESDDTPIHICSEILAEETGTRPDLRDQPLPGVPAWYTDGSSFIMDGRRQAGAAIVDNKRTVWASNLPEGTSAQKAELIALTQALRLAEGKSINIYTDSRYAFATAHVHGAIYKQRGLLTSAGKDIKNKEEILALLEAIHLPKRVAIIHCPGHQRGTDPVATGNRKADEAAKQAAQSTRILTETTKNAGKRTADGSEFEKRTADGSEFESPKKKAKVE

SEQ ID NO: 6961 - protein, 2218 aa, synthetic construct
MPAAKRVKLDGGDKKYSIGLDIGTNSVGWAVITDEYKVPSKKFKVLGNTDRHSIKKNLIGALLFDSGETAEATRLKRTARRRYTRRKNRICYLQEIFSNEMAKVDDSFFHRLEESFLVEEDKKHERHPIFGNIVDEVAYHEKYPTIYHLRKKLVDSTDKADLRLIYLALAHMIKFRGHFLIEGDLNPDNSDVDKLFIQLVQTYNQLFEENPINASGVDAKAILSARLSKSRRLENLIAQLPGEKKNGLFGNLIALSLGLTPNFKSNFDLAEDAKLQLSKDTYDDDLDNLLAQIGDQYADLFLAAKNLSDAILLSDILRVNTEITKAPLSASMIKRYDEHHQDLTLLKALVRQQLPEKYKEIFFDQSKNGYAGYIDGGASQEEFYKFIKPILEKMDGTEELLVKLNREDLLRKQRTFDNGSIPHQIHLGELHAILRRQEDFYPFLKDNREKIEKILTFRIPYYVGPLARGNSRFAWMTRKSEETITPWNFEEVVDKGASAQSFIERMTNFDKNLPNEKVLPKHSLLYEYFTVYNELTKVKYVTEGMRKPAFLSGEQKKAIVDLLFKTNRKVTVKQLKEDYFKKIECFDSVEISGVEDRFNASLGTYHDLLKIIKDKDFLDNEENEDILEDIVLTLTLFEDREMIEERLKTYAHLFDDKVMKQLKRRRYTGWGRLSRKLINGIRDKQSGKTILDFLKSDGFANRNFMQLIHDDSLTFKEDIQKAQVSGQGDSLHEHIANLAGSPAIKKGILQTVKVVDELVKVMGRHKPENIVIEMARENQTTQKGQKNSRERMKRIEEGIKELGSQILKEHPVENTQLQNEKLYLYYLQNGRDMYVDQELDINRLSDYDVDHIVPQSFLKDDSIDNKVLTRSDKARGKSDNVPSEEVVKKMKNYWRQLLNAKLITQRKFDNLTKAERGGLSELDKAGFIKRQLVETRQITKHVAQILDSRMNTKYDENDKLIREVKVITLKSKLVSDFRKDFQFYKVREINNYHHAHDAYLNAVVGTALIKKYPKLESEFVYGDYKVYDVRKMIAKSEQEIGKATAKYFFYSNIMNFFKTEITLANGEIRKRPLIETNGETGEIVWDKGRDFATVRKVLSMPQVNIVKKTEVQTGGFSKESILPKRNSDKLIARKKDWDPKKYGGFDSPTVAYSVLVVAKVEKGKSKKLKSVKELLGITIMERSSFEKNPIDFLEAKGYKEVKKDLIIKLPKYSLFELENGRKRMLASAGELQKGNELALPSKYVNFLYLASHYEKLKGSPEDNEQKQLFVEQHKHYLDEIIEQISEFSKRVILADANLDKVLSAYNKHRDKPIREQAENIIHLFTLTNLGAPAAFKYFDTTIDRKRYTSTKEVLDATLIHQSITGLYETRIDLSQLGGDGGEAAAKGGGGGSGGTLGDQGSRGSDPLPEPRVTLTVEGIPTEFLVNTGAEHSVLTKPMGKMGSKRTVVAGATGSKVYPWTTKRLLKIGQKQVTHSFLVIPECPAPLLGRDLLTKLKAQIQFSTEGPQVTWEDRPAMCLVLNLEEEYRLHEKPVPPSIDPSWLQLFPMVWAEKAGMGLANQVPPVVVELKSDASPVAVRQYPMSKEAREGIRPHIQRFLDLGILVPCQSPWNTPLLPVKKPGTNDYRPVQDLREVNKRVQDIHPTVPNPYNLLSSLPPSHTWYSVLDLKDAFFCLKLHPNSQPLFAFEWRDPEKGNTGQLTWTRLPQGFKNSPTLFNEALHRDLASFRALNPQVVMLQYVDDLLVAAPTYRDCKEGTRRLLQELSKLGYRVSAKKAQLCREEVTYLGYLLKGGKRWLTPARKATVMKIPTPTTPRQVREFLGTAGFCRLWIPGFASLAAPLYPLTRPKVPFTWTEAHQEAFGRIKEALLSAPALALPDLTKPFALYVDEKEGVARGVLTQTLGPWRRPVAYLSKKLDPVASGWPTCLKAIAAVALLLKDADKLTLGQNVLVIAPHNLESIVRQPPDRWMTNARMTHYQSLLLNERVSFAPPAILNPATLLPVESDDTPIHICSEILAEETGTRPDLRDQPLPGVPAWYTDGSSFIMDGRRQAGAAIVDNKRTVWASNLPEGTSAQKAELIALTQALRLAEGKSINIYTDSRYAFATAHVHGAIYKQRGWLTSAGKDIKNKEEILALLEAIHLPKRVAIIHCPGHQRGTDPVATGNRKADEAAKQAAQSTRILTETTKNAGKRTADGSEFEKRTADGSEFESPKKKAKVE

SEQ ID NO: 6962 - protein, 2218 aa, synthetic construct
MPAAKRVKLDGGDKKYSIGLDIGTNSVGWAVITDEYKVPSKKFKVLGNTDRHSIKKNLIGALLFDSGETAEATRLKRTARRRYTRRKNRICYLQEIFSNEMAKVDDSFFHRLEESFLVEEDKKHERHPIFGNIVDEVAYHEKYPTIYHLRKKLVDSTDKADLRLIYLALAHMIKFRGHFLIEGDLNPDNSDVDKLFIQLVQTYNQLFEENPINASGVDAKAILSARLSKSRRLENLIAQLPGEKKNGLFGNLIALSLGLTPNFKSNFDLAEDAKLQLSKDTYDDDLDNLLAQIGDQYADLFLAAKNLSDAILLSDILRVNTEITKAPLSASMIKRYDEHHQDLTLLKALVRQQLPEKYKEIFFDQSKNGYAGYIDGGASQEEFYKFIKPILEKMDGTEELLVKLNREDLLRKQRTFDNGSIPHQIHLGELHAILRRQEDFYPFLKDNREKIEKILTFRIPYYVGPLARGNSRFAWMTRKSEETITPWNFEEVVDKGASAQSFIERMTNFDKNLPNEKVLPKHSLLYEYFTVYNELTKVKYVTEGMRKPAFLSGEQKKAIVDLLFKTNRKVTVKQLKEDYFKKIECFDSVEISGVEDRFNASLGTYHDLLKIIKDKDFLDNEENEDILEDIVLTLTLFEDREMIEERLKTYAHLFDDKVMKQLKRRRYTGWGRLSRKLINGIRDKQSGKTILDFLKSDGFANRNFMQLIHDDSLTFKEDIQKAQVSGQGDSLHEHIANLAGSPAIKKGILQTVKVVDELVKVMGRHKPENIVIEMARENQTTQKGQKNSRERMKRIEEGIKELGSQILKEHPVENTQLQNEKLYLYYLQNGRDMYVDQELDINRLSDYDVDHIVPQSFLKDDSIDNKVLTRSDKARGKSDNVPSEEVVKKMKNYWRQLLNAKLITQRKFDNLTKAERGGLSELDKAGFIKRQLVETRQITKHVAQILDSRMNTKYDENDKLIREVKVITLKSKLVSDFRKDFQFYKVREINNYHHAHDAYLNAVVGTALIKKYPKLESEFVYGDYKVYDVRKMIAKSEQEIGKATAKYFFYSNIMNFFKTEITLANGEIRKRPLIETNGETGEIVWDKGRDFATVRKVLSMPQVNIVKKTEVQTGGFSKESILPKRNSDKLIARKKDWDPKKYGGFDSPTVAYSVLVVAKVEKGKSKKLKSVKELLGITIMERSSFEKNPIDFLEAKGYKEVKKDLIIKLPKYSLFELENGRKRMLASAGELQKGNELALPSKYVNFLYLASHYEKLKGSPEDNEQKQLFVEQHKHYLDEIIEQISEFSKRVILADANLDKVLSAYNKHRDKPIREQAENIIHLFTLTNLGAPAAFKYFDTTIDRKRYTSTKEVLDATLIHQSITGLYETRIDLSQLGGDGGEAAAKGGGGGSGGTLGDQGSRGSDPLPEPRVTLTVEGIPTEFLVNTGAEHSVLTKPMGKMGSKRTVVAGATGSKVYPWTTKRLLKIGQKQVTHSFLVIPECPAPLLGRDLLTKLKAQIQFSTEGPQVTWEDRPAMCLVLNLEEEYRLHEKPVPPSIDPSWLQLFPMVWAEKAGMGLANQVPPVVVELKSDASPVAVRQYPMSKEAREGIRPHIQRFLDLGILVPCQSPWNTPLLPVKKPGTNDYRPVQDLREVNKRVQDIHPTVPNPYNLLSSLPPSHTWYSVLDLKDAFFCLKLHPNSQPLFAFEWRDPEKGNTGQLTWTRLPQGFKNSPTLFNEALHRDLASFRALNPQVVMLQYVDDLLVAAPTYRDCKEGTRRLLQELSKLGYRVSAKKAQLCREEVTYLGYLLKGGKRWLTPARKATVMKIPTPTTPRQVREFLGKAGFCRLFIPGFASLAAPLYPLTRPKVPFTWTEAHQEAFGRIKEALLSAPALALPDLTKPFALYVDEKEGVARGVLTQTLGPWRRPVAYLSKKLDPVASGWPTCLKAIAAVALLLKDADKLTLGQNVLVIAPHNLESIVRQPPDRWMTNARMTHYQSLLLNERVSFAPPAILNPATLLPVESDDTPIHICSEILAEETGTRPDLRDQPLPGVPAWYTDGSSFIMDGRRQAGAAIVDNKRTVWASNLPEGTSAQKAELIALTQALRLAEGKSINIYTDSRYAFATAHVHGAIYKQRGWLTSAGKDIKNKEEILALLEAIHLPKRVAIIHCPGHQRGTDPVATGNRKADEAAKQAAQSTRILTETTKNAGKRTADGSEFEKRTADGSEFESPKKKAKVE

SEQ ID NO: 6963 - protein, 2096 aa, synthetic construct
MPAAKRVKLDGGDKKYSIGLDIGTNSVGWAVITDEYKVPSKKFKVLGNTDRHSIKKNLIGALLFDSGETAEATRLKRTARRRYTRRKNRICYLQEIFSNEMAKVDDSFFHRLEESFLVEEDKKHERHPIFGNIVDEVAYHEKYPTIYHLRKKLVDSTDKADLRLIYLALAHMIKFRGHFLIEGDLNPDNSDVDKLFIQLVQTYNQLFEENPINASGVDAKAILSARLSKSRRLENLIAQLPGEKKNGLFGNLIALSLGLTPNFKSNFDLAEDAKLQLSKDTYDDDLDNLLAQIGDQYADLFLAAKNLSDAILLSDILRVNTEITKAPLSASMIKRYDEHHQDLTLLKALVRQQLPEKYKEIFFDQSKNGYAGYIDGGASQEEFYKFIKPILEKMDGTEELLVKLNREDLLRKQRTFDNGSIPHQIHLGELHAILRRQEDFYPFLKDNREKIEKILTFRIPYYVGPLARGNSRFAWMTRKSEETITPWNFEEVVDKGASAQSFIERMTNFDKNLPNEKVLPKHSLLYEYFTVYNELTKVKYVTEGMRKPAFLSGEQKKAIVDLLFKTNRKVTVKQLKEDYFKKIECFDSVEISGVEDRFNASLGTYHDLLKIIKDKDFLDNEENEDILEDIVLTLTLFEDREMIEERLKTYAHLFDDKVMKQLKRRRYTGWGRLSRKLINGIRDKQSGKTILDFLKSDGFANRNFMQLIHDDSLTFKEDIQKAQVSGQGDSLHEHIANLAGSPAIKKGILQTVKVVDELVKVMGRHKPENIVIEMARENQTTQKGQKNSRERMKRIEEGIKELGSQILKEHPVENTQLQNEKLYLYYLQNGRDMYVDQELDINRLSDYDVDHIVPQSFLKDDSIDNKVLTRSDKARGKSDNVPSEEVVKKMKNYWRQLLNAKLITQRKFDNLTKAERGGLSELDKAGFIKRQLVETRQITKHVAQILDSRMNTKYDENDKLIREVKVITLKSKLVSDFRKDFQFYKVREINNYHHAHDAYLNAVVGTALIKKYPKLESEFVYGDYKVYDVRKMIAKSEQEIGKATAKYFFYSNIMNFFKTEITLANGEIRKRPLIETNGETGEIVWDKGRDFATVRKVLSMPQVNIVKKTEVQTGGFSKESILPKRNSDKLIARKKDWDPKKYGGFDSPTVAYSVLVVAKVEKGKSKKLKSVKELLGITIMERSSFEKNPIDFLEAKGYKEVKKDLIIKLPKYSLFELENGRKRMLASAGELQKGNELALPSKYVNFLYLASHYEKLKGSPEDNEQKQLFVEQHKHYLDEIIEQISEFSKRVILADANLDKVLSAYNKHRDKPIREQAENIIHLFTLTNLGAPAAFKYFDTTIDRKRYTSTKEVLDATLIHQSITGLYETRIDLSQLGGDGGEAAAKGGGGGSGGTLNLEDEYRLYETSAEPEVSPGSTWLSDFPQAWAETGGMGLAVRQAPLIIPLKATSTPVSIKQYPMSQEAKLGIKPHIQRLLDQGILVPCQSPWNTPLLPVKKPGTNDYRPVQDLREVNKRVEDIHPTVPNPYNLLSGLPPSHRWYTVLDLKDAFFCLRLHPTSQPLFAFEWRDPGMGISGQLTWTRLPQGFKNSPTLFNEALHRDLADFRIQHPDLILLQYVDDILLAATSELDCQQGTRALLLTLGNLGYRASAKKAQLCQKQVKYLGYLLKEGQRWLTEARKETVMGQPTPKTPRQLREFLGKAGFCRLFIPGFAEMAAPLYPLTKPGTLFNWGPDQQKAYQEIKQALLTAPALGLPDLTKPFELFVDEKQGYAKGVLTQKLGPWRRPVAYLSKKLDPVAAGWPPCLRMVAAIAVLRKDAGKLTMGQPLVILAPHAVEALVKQPPDRWLSNARMTHYQAMLLDTDRVQFGPVVALNPATLLPLPEEGAPHDCLEILAETHGTRPDLTDQPIPDADHTWYTDGSSFLQEGQRKAGAAVTTETEVIWARALPAGTSAQRAELIALTQALKMAEGKRLNVYTDSRYAFATAHIHGEIYRRRGWLTSEGREIKNKSEILALLKALFLPKRLSIIHCLGHQKGDSAEARGNRLADQAAREAAIKTPPDTSTLLAGKRTADGSEFEKRTADGSEFESPKKKAKVE

SEQ ID NO: 6964 - protein, 2096 aa, synthetic construct
MPAAKRVKLDGGDKKYSIGLDIGTNSVGWAVITDEYKVPSKKFKVLGNTDRHSIKKNLIGALLFDSGETAEATRLKRTARRRYTRRKNRICYLQEIFSNEMAKVDDSFFHRLEESFLVEEDKKHERHPIFGNIVDEVAYHEKYPTIYHLRKKLVDSTDKADLRLIYLALAHMIKFRGHFLIEGDLNPDNSDVDKLFIQLVQTYNQLFEENPINASGVDAKAILSARLSKSRRLENLIAQLPGEKKNGLFGNLIALSLGLTPNFKSNFDLAEDAKLQLSKDTYDDDLDNLLAQIGDQYADLFLAAKNLSDAILLSDILRVNTEITKAPLSASMIKRYDEHHQDLTLLKALVRQQLPEKYKEIFFDQSKNGYAGYIDGGASQEEFYKFIKPILEKMDGTEELLVKLNREDLLRKQRTFDNGSIPHQIHLGELHAILRRQEDFYPFLKDNREKIEKILTFRIPYYVGPLARGNSRFAWMTRKSEETITPWNFEEVVDKGASAQSFIERMTNFDKNLPNEKVLPKHSLLYEYFTVYNELTKVKYVTEGMRKPAFLSGEQKKAIVDLLFKTNRKVTVKQLKEDYFKKIECFDSVEISGVEDRFNASLGTYHDLLKIIKDKDFLDNEENEDILEDIVLTLTLFEDREMIEERLKTYAHLFDDKVMKQLKRRRYTGWGRLSRKLINGIRDKQSGKTILDFLKSDGFANRNFMQLIHDDSLTFKEDIQKAQVSGQGDSLHEHIANLAGSPAIKKGILQTVKVVDELVKVMGRHKPENIVIEMARENQTTQKGQKNSRERMKRIEEGIKELGSQILKEHPVENTQLQNEKLYLYYLQNGRDMYVDQELDINRLSDYDVDHIVPQSFLKDDSIDNKVLTRSDKARGKSDNVPSEEVVKKMKNYWRQLLNAKLITQRKFDNLTKAERGGLSELDKAGFIKRQLVETRQITKHVAQILDSRMNTKYDENDKLIREVKVITLKSKLVSDFRKDFQFYKVREINNYHHAHDAYLNAVVGTALIKKYPKLESEFVYGDYKVYDVRKMIAKSEQEIGKATAKYFFYSNIMNFFKTEITLANGEIRKRPLIETNGETGEIVWDKGRDFATVRKVLSMPQVNIVKKTEVQTGGFSKESILPKRNSDKLIARKKDWDPKKYGGFDSPTVAYSVLVVAKVEKGKSKKLKSVKELLGITIMERSSFEKNPIDFLEAKGYKEVKKDLIIKLPKYSLFELENGRKRMLASAGELQKGNELALPSKYVNFLYLASHYEKLKGSPEDNEQKQLFVEQHKHYLDEIIEQISEFSKRVILADANLDKVLSAYNKHRDKPIREQAENIIHLFTLTNLGAPAAFKYFDTTIDRKRYTSTKEVLDATLIHQSITGLYETRIDLSQLGGDGGEAAAKGGGGGSGGTLGIEDEYRLHETSTEPDVSLGSTWLSDFPQAWAETGGMGLAVRQAPLIIPLKATSTPVSIQQYPMSHEARLGIKPHIQRLLDQGILVPCQSPWNTPLLPVKKPGTNDYRPVQDLREVNKRVEDIHPTVPNPYNLLSGLPPSHQWYTVLDLKDAFFCLRLHPTSQPLFAFEWRDPGMGISGQLTWTRLPQGFKNSPTLFDEALHRDLADFRIQHPDLILLQYVDDILLAATSELDCQQGTRALLQTLGDLGYRASAKKAQICQKQVKYLGYLLREGQRWLTEARKETVMGQPVPKTPRQLREFLGTAGFCRLWIPGFAEMAAPLYPLTKTGTLFSWGPDQQKAYQEIKQALLTAPALGLPDLTKPFELFVDEKQGYAKGVLTQKLGPWRRPVAYLSKKLDPVAAGWPPCLRMVAAIAVLTKDAGKLTMGQPLVILAPHAVEALVKQPPDRWLSNARMTHYQAMLLDTDRVQFGPVVALNPATLLPLPEEGAPHDCLEILAETHGTRPDLTDQPIPDADHTWYTDGSSFLQEGQRKAGAAVTTETEVIWAGALPAGTSAQRAELIALTQALKMAEGKRLNVYTDSRYAFATAHIHGEIYRRRGLLTSEGREIKNKSEILALLKALFLPKRLSIIHCLGHQKGDSAEARGNRLADQAAREAAIKTPPDTSTLLAGKRTADGSEFEKRTADGSEFESPKKKAKVE

SEQ ID NO: 6965 - protein, 2096 aa, synthetic construct
MPAAKRVKLDGGDKKYSIGLDIGTNSVGWAVITDEYKVPSKKFKVLGNTDRHSIKKNLIGALLFDSGETAEATRLKRTARRRYTRRKNRICYLQEIFSNEMAKVDDSFFHRLEESFLVEEDKKHERHPIFGNIVDEVAYHEKYPTIYHLRKKLVDSTDKADLRLIYLALAHMIKFRGHFLIEGDLNPDNSDVDKLFIQLVQTYNQLFEENPINASGVDAKAILSARLSKSRRLENLIAQLPGEKKNGLFGNLIALSLGLTPNFKSNFDLAEDAKLQLSKDTYDDDLDNLLAQIGDQYADLFLAAKNLSDAILLSDILRVNTEITKAPLSASMIKRYDEHHQDLTLLKALVRQQLPEKYKEIFFDQSKNGYAGYIDGGASQEEFYKFIKPILEKMDGTEELLVKLNREDLLRKQRTFDNGSIPHQIHLGELHAILRRQEDFYPFLKDNREKIEKILTFRIPYYVGPLARGNSRFAWMTRKSEETITPWNFEEVVDKGASAQSFIERMTNFDKNLPNEKVLPKHSLLYEYFTVYNELTKVKYVTEGMRKPAFLSGEQKKAIVDLLFKTNRKVTVKQLKEDYFKKIECFDSVEISGVEDRFNASLGTYHDLLKIIKDKDFLDNEENEDILEDIVLTLTLFEDREMIEERLKTYAHLFDDKVMKQLKRRRYTGWGRLSRKLINGIRDKQSGKTILDFLKSDGFANRNFMQLIHDDSLTFKEDIQKAQVSGQGDSLHEHIANLAGSPAIKKGILQTVKVVDELVKVMGRHKPENIVIEMARENQTTQKGQKNSRERMKRIEEGIKELGSQILKEHPVENTQLQNEKLYLYYLQNGRDMYVDQELDINRLSDYDVDHIVPQSFLKDDSIDNKVLTRSDKARGKSDNVPSEEVVKKMKNYWRQLLNAKLITQRKFDNLTKAERGGLSELDKAGFIKRQLVETRQITKHVAQILDSRMNTKYDENDKLIREVKVITLKSKLVSDFRKDFQFYKVREINNYHHAHDAYLNAVVGTALIKKYPKLESEFVYGDYKVYDVRKMIAKSEQEIGKATAKYFFYSNIMNFFKTEITLANGEIRKRPLIETNGETGEIVWDKGRDFATVRKVLSMPQVNIVKKTEVQTGGFSKESILPKRNSDKLIARKKDWDPKKYGGFDSPTVAYSVLVVAKVEKGKSKKLKSVKELLGITIMERSSFEKNPIDFLEAKGYKEVKKDLIIKLPKYSLFELENGRKRMLASAGELQKGNELALPSKYVNFLYLASHYEKLKGSPEDNEQKQLFVEQHKHYLDEIIEQISEFSKRVILADANLDKVLSAYNKHRDKPIREQAENIIHLFTLTNLGAPAAFKYFDTTIDRKRYTSTKEVLDATLIHQSITGLYETRIDLSQLGGDGGEAAAKGGGGGSGGTLNIEDEYRLHETSKGPDVPLGSTWLSDFPQAWAETGGMGLAVRQAPLIIPLKATSTPVSIKQYPMSQEARLGIKPHIQRLLDQGILVPCQSPWNTPLLPVKKPGTNDYRPVQDLREVNKRVEDIHPTVPNPYNLLSGLPPSHQWYTVLDLKDAFFCLRLHPTSQSLFAFEWRDPEMGISGQLTWTRLPQGFKNSPTLFDEALHRDLADFRIQHPDLILLQYVDDLLLAATSELDCQQGTRALLQTLGDLGYRASAKKAQICQKQVKYLGYLLKEGQRWLTEARKETVMGQPTPKTPRQLREFLGTAGFCRLWIPGFAEMAAPLYPLTKTGTLFEWGPDQQKAYQEIKQALLTAPALGLPDLTKPFELFVDEKQGYAKGVLTQKLGPWRRPVAYLSKKLDPVAAGWPPCLRMVAAIAVLTKDAGKLTMGQPLVILAPHAVEALVKQPPDRWLSNARMTHYQALLLDTDRVQFGPIVALNPATLLPLPEEGLQHDCLDILAEAHGTRPDLTDQPLPDADHTWYTDGSSFLQEGQRKAGAAVTTETEVVWAKALPAGTSAQRAELIALTQALKMAEGKKLNVYTDSRYAFATAHIHGEIYRRRGLLTSEGKEIKNKDEILALLKALFLPKRLSIIHCPGHQKGNRAEARGNRMADQAAREVATRETPETSTLLAGKRTADGSEFEKRTADGSEFESPKKKAKVE

SEQ ID NO: 6966 - protein, 2087 aa, synthetic construct
MPAAKRVKLDGGDKKYSIGLDIGTNSVGWAVITDEYKVPSKKFKVLGNTDRHSIKKNLIGALLFDSGETAEATRLKRTARRRYTRRKNRICYLQEIFSNEMAKVDDSFFHRLEESFLVEEDKKHERHPIFGNIVDEVAYHEKYPTIYHLRKKLVDSTDKADLRLIYLALAHMIKFRGHFLIEGDLNPDNSDVDKLFIQLVQTYNQLFEENPINASGVDAKAILSARLSKSRRLENLIAQLPGEKKNGLFGNLIALSLGLTPNFKSNFDLAEDAKLQLSKDTYDDDLDNLLAQIGDQYADLFLAAKNLSDAILLSDILRVNTEITKAPLSASMIKRYDEHHQDLTLLKALVRQQLPEKYKEIFFDQSKNGYAGYIDGGASQEEFYKFIKPILEKMDGTEELLVKLNREDLLRKQRTFDNGSIPHQIHLGELHAILRRQEDFYPFLKDNREKIEKILTFRIPYYVGPLARGNSRFAWMTRKSEETITPWNFEEVVDKGASAQSFIERMTNFDKNLPNEKVLPKHSLLYEYFTVYNELTKVKYVTEGMRKPAFLSGEQKKAIVDLLFKTNRKVTVKQLKEDYFKKIECFDSVEISGVEDRFNASLGTYHDLLKIIKDKDFLDNEENEDILEDIVLTLTLFEDREMIEERLKTYAHLFDDKVMKQLKRRRYTGWGRLSRKLINGIRDKQSGKTILDFLKSDGFANRNFMQLIHDDSLTFKEDIQKAQVSGQGDSLHEHIANLAGSPAIKKGILQTVKVVDELVKVMGRHKPENIVIEMARENQTTQKGQKNSRERMKRIEEGIKELGSQILKEHPVENTQLQNEKLYLYYLQNGRDMYVDQELDINRLSDYDVDHIVPQSFLKDDSIDNKVLTRSDKARGKSDNVPSEEVVKKMKNYWRQLLNAKLITQRKFDNLTKAERGGLSELDKAGFIKRQLVETRQITKHVAQILDSRMNTKYDENDKLIREVKVITLKSKLVSDFRKDFQFYKVREINNYHHAHDAYLNAVVGTALIKKYPKLESEFVYGDYKVYDVRKMIAKSEQEIGKATAKYFFYSNIMNFFKTEITLANGEIRKRPLIETNGETGEIVWDKGRDFATVRKVLSMPQVNIVKKTEVQTGGFSKESILPKRNSDKLIARKKDWDPKKYGGFDSPTVAYSVLVVAKVEKGKSKKLKSVKELLGITIMERSSFEKNPIDFLEAKGYKEVKKDLIIKLPKYSLFELENGRKRMLASAGELQKGNELALPSKYVNFLYLASHYEKLKGSPEDNEQKQLFVEQHKHYLDEIIEQISEFSKRVILADANLDKVLSAYNKHRDKPIREQAENIIHLFTLTNLGAPAAFKYFDTTIDRKRYTSTKEVLDATLIHQSITGLYETRIDLSQLGGDGGEAAAKGGGGGSGGIPWLMKKPLQLTTLVPLQEYEERLLKQTMLTGSYKEKLQSLFLKYDALWQHWENQVGHRRIKPHHIATGTVNPRPQKQYPINPKAKASIQTVINDLLKQGVLIQQNSIMNTPVYPVPKPDGKWRMVLDYREVNKTIPLIAAQNQHSAGILSSIFRGKYKTTLDLSNGFWAHSITPESYWLTAFTWLGQQYCWTRLPQGFLNSPALFNADVVDLLKEVPNVQVYVDDIYISHDDPREHLEQLEKVFSLLLNAGYVVSLKKSEIAQHEVEFLGFNITKEGRGLTETFKQKLLNITPPRDLKQLQSILGLLNFARNFIPNFSELVKPLYNIIATAPGKYITWTTDNSQQLQNIISMLNSAENLEERNPEVRLIMKVNTSPSAGYIRFYNEFAKRPIMYLNYVYTKAEVKFTNTEKLLTTIHKGLIKALDLGMGQEILVYSPIVSMTKIQKTPLPERKALPIRWITWMSYLEDPRIQFHYDKTLPELQQVPTVTDDIIAKIKHPSEFSMVFYTDGSAIKHPNVNKSHNAGMGIAQVQFKPEFTVINTWSIPLGDHTAQLAEVAAVEFACKKALKIDGPVLIVTDSFYVAESVNKELPYWQSNGFFNNKKKPLKHVSKWKSIADCIQLKPDIIIIHEKGHQPTASTFHTEGNNLADKLATQGSYVVNAGKRTADGSEFEKRTADGSEFESPKKKAKVE

SEQ ID NO: 6967 - protein, 2087 aa, synthetic construct
MPAAKRVKLDGGDKKYSIGLDIGTNSVGWAVITDEYKVPSKKFKVLGNTDRHSIKKNLIGALLFDSGETAEATRLKRTARRRYTRRKNRICYLQEIFSNEMAKVDDSFFHRLEESFLVEEDKKHERHPIFGNIVDEVAYHEKYPTIYHLRKKLVDSTDKADLRLIYLALAHMIKFRGHFLIEGDLNPDNSDVDKLFIQLVQTYNQLFEENPINASGVDAKAILSARLSKSRRLENLIAQLPGEKKNGLFGNLIALSLGLTPNFKSNFDLAEDAKLQLSKDTYDDDLDNLLAQIGDQYADLFLAAKNLSDAILLSDILRVNTEITKAPLSASMIKRYDEHHQDLTLLKALVRQQLPEKYKEIFFDQSKNGYAGYIDGGASQEEFYKFIKPILEKMDGTEELLVKLNREDLLRKQRTFDNGSIPHQIHLGELHAILRRQEDFYPFLKDNREKIEKILTFRIPYYVGPLARGNSRFAWMTRKSEETITPWNFEEVVDKGASAQSFIERMTNFDKNLPNEKVLPKHSLLYEYFTVYNELTKVKYVTEGMRKPAFLSGEQKKAIVDLLFKTNRKVTVKQLKEDYFKKIECFDSVEISGVEDRFNASLGTYHDLLKIIKDKDFLDNEENEDILEDIVLTLTLFEDREMIEERLKTYAHLFDDKVMKQLKRRRYTGWGRLSRKLINGIRDKQSGKTILDFLKSDGFANRNFMQLIHDDSLTFKEDIQKAQVSGQGDSLHEHIANLAGSPAIKKGILQTVKVVDELVKVMGRHKPENIVIEMARENQTTQKGQKNSRERMKRIEEGIKELGSQILKEHPVENTQLQNEKLYLYYLQNGRDMYVDQELDINRLSDYDVDHIVPQSFLKDDSIDNKVLTRSDKARGKSDNVPSEEVVKKMKNYWRQLLNAKLITQRKFDNLTKAERGGLSELDKAGFIKRQLVETRQITKHVAQILDSRMNTKYDENDKLIREVKVITLKSKLVSDFRKDFQFYKVREINNYHHAHDAYLNAVVGTALIKKYPKLESEFVYGDYKVYDVRKMIAKSEQEIGKATAKYFFYSNIMNFFKTEITLANGEIRKRPLIETNGETGEIVWDKGRDFATVRKVLSMPQVNIVKKTEVQTGGFSKESILPKRNSDKLIARKKDWDPKKYGGFDSPTVAYSVLVVAKVEKGKSKKLKSVKELLGITIMERSSFEKNPIDFLEAKGYKEVKKDLIIKLPKYSLFELENGRKRMLASAGELQKGNELALPSKYVNFLYLASHYEKLKGSPEDNEQKQLFVEQHKHYLDEIIEQISEFSKRVILADANLDKVLSAYNKHRDKPIREQAENIIHLFTLTNLGAPAAFKYFDTTIDRKRYTSTKEVLDATLIHQSITGLYETRIDLSQLGGDGGEAAAKGGGGGSGGIPWLMKKPLQLTTLVPLQEYEERLLKQTMLTGSYKEKLQSLFLKYDALWQHWENQVGHRRIKPHHIATGTVNPRPQKQYPINPKAKASIQTVINDLLKQGVLIQQNSIMNTPVYPVPKPDGKWRMVLDYREVNKTIPLIAAQNQHSAGILSSIFRGKYKTTLDLSNGFWAHSITPESYWLTAFTWLGQQYCWTRLPQGFLNSPALFNADVVDLLKEVPNVQVYVDDIYISHDDPREHLEQLEKVFSLLLNAGYVVSLKKSEIAQHEVEFLGFNITKEGRGLTETFKQKLLNITPPRDLKQLQSILGKLNFARNFIPNFSELVKPLYNIIATAPGKYITWTTDNSQQLQNIISMLNSAENLEERNPEVRLIMKVNTSPSAGYIRFYNEFAKRPIMYLNYVYTKAEVKFTNTEKLLTTIHKGLIKALDLGMGQEILVYSPIVSMTKIQKTPLPERKALPIRWITWMSYLEDPRIQFHYDKTLPELQQVPTVTDDIIAKIKHPSEFSMVFYTDGSAIKHPNVNKSHNAGMGIAQVQFKPEFTVINTWSIPLGDHTAQLAEVAAVEFACKKALKIDGPVLIVTDSFYVAESVNKELPYWQSNGFFNNKKKPLKHVSKWKSIADCIQLKPDIIIIHEKGHQPTASTFHTEGNNLADKLATQGSYVVNAGKRTADGSEFEKRTADGSEFESPKKKAKVE

SEQ ID NO: 6968 - protein, 2094 aa, synthetic construct
MPAAKRVKLDGGDKKYSIGLDIGTNSVGWAVITDEYKVPSKKFKVLGNTDRHSIKKNLIGALLFDSGETAEATRLKRTARRRYTRRKNRICYLQEIFSNEMAKVDDSFFHRLEESFLVEEDKKHERHPIFGNIVDEVAYHEKYPTIYHLRKKLVDSTDKADLRLIYLALAHMIKFRGHFLIEGDLNPDNSDVDKLFIQLVQTYNQLFEENPINASGVDAKAILSARLSKSRRLENLIAQLPGEKKNGLFGNLIALSLGLTPNFKSNFDLAEDAKLQLSKDTYDDDLDNLLAQIGDQYADLFLAAKNLSDAILLSDILRVNTEITKAPLSASMIKRYDEHHQDLTLLKALVRQQLPEKYKEIFFDQSKNGYAGYIDGGASQEEFYKFIKPILEKMDGTEELLVKLNREDLLRKQRTFDNGSIPHQIHLGELHAILRRQEDFYPFLKDNREKIEKILTFRIPYYVGPLARGNSRFAWMTRKSEETITPWNFEEVVDKGASAQSFIERMTNFDKNLPNEKVLPKHSLLYEYFTVYNELTKVKYVTEGMRKPAFLSGEQKKAIVDLLFKTNRKVTVKQLKEDYFKKIECFDSVEISGVEDRFNASLGTYHDLLKIIKDKDFLDNEENEDILEDIVLTLTLFEDREMIEERLKTYAHLFDDKVMKQLKRRRYTGWGRLSRKLINGIRDKQSGKTILDFLKSDGFANRNFMQLIHDDSLTFKEDIQKAQVSGQGDSLHEHIANLAGSPAIKKGILQTVKVVDELVKVMGRHKPENIVIEMARENQTTQKGQKNSRERMKRIEEGIKELGSQILKEHPVENTQLQNEKLYLYYLQNGRDMYVDQELDINRLSDYDVDHIVPQSFLKDDSIDNKVLTRSDKARGKSDNVPSEEVVKKMKNYWRQLLNAKLITQRKFDNLTKAERGGLSELDKAGFIKRQLVETRQITKHVAQILDSRMNTKYDENDKLIREVKVITLKSKLVSDFRKDFQFYKVREINNYHHAHDAYLNAVVGTALIKKYPKLESEFVYGDYKVYDVRKMIAKSEQEIGKATAKYFFYSNIMNFFKTEITLANGEIRKRPLIETNGETGEIVWDKGRDFATVRKVLSMPQVNIVKKTEVQTGGFSKESILPKRNSDKLIARKKDWDPKKYGGFDSPTVAYSVLVVAKVEKGKSKKLKSVKELLGITIMERSSFEKNPIDFLEAKGYKEVKKDLIIKLPKYSLFELENGRKRMLASAGELQKGNELALPSKYVNFLYLASHYEKLKGSPEDNEQKQLFVEQHKHYLDEIIEQISEFSKRVILADANLDKVLSAYNKHRDKPIREQAENIIHLFTLTNLGAPAAFKYFDTTIDRKRYTSTKEVLDATLIHQSITGLYETRIDLSQLGGDGGEAAAKGGGGGSGGVLNLEEEYRLHEKPVPSSIDPSWLQLFPTVWAERAGMGLANQVPPVVVELRSGASPVAVRQYPMSKEAREGIRPHIQRFLDLGVLVPCQSPWNTPLLPVKKPGTNDYRPVQDLREINKRVQDIHPTVPNPYNLLSSLPPSHTWYSVLDLKDAFFCLKLHPNSQPLFAFEWRDPEKGNTGQLTWTRLPQGFKNSPTLFNEALHRDLAPFRALNPQVVLLQYVDDLLVAAPTYRDCKEGTQKLLQELSKLGYRVSAKKAQLCQKEVTYLGYLLKEGKRWLTPARKATVMKIPPPTTPRQVREFLGKAGFCRLFIPGFASLAAPLYPLTKPSIPFIWTEEHQKAFDRIKEALLSAPALALPDLTKPFTLYVDERAGVARGVLTQTLGPWRRPVAYLSKKLDPVASGWPTCLKAVAAVALLLKDADKLTLGQNVTVIASHSLESIVRQPPDRWMTNARMTHYQSLLLNERVSFAPPAVLNPATLLPVESEATPVHRCSEILAEETGTRRDLKDQPLPGVPAWYTDGSSFIAEGKRRAGAAIVDGKRTVWASSLPEGTSAQKAELVALTQALRLAEGKDINIYTDSRYAFATAHIHGAIYKQRGWLTSAGKDIKNKEEILALLEAIHLPKRVAIIHCPGHQKGNDPVATGNRRADEAAKQAALSTRVLAETTKPAGKRTADGSEFEKRTADGSEFESPKKKAKVE

SEQ ID NO: 6969 - protein, 2096 aa, synthetic construct
MPAAKRVKLDGGDKKYSIGLDIGTNSVGWAVITDEYKVPSKKFKVLGNTDRHSIKKNLIGALLFDSGETAEATRLKRTARRRYTRRKNRICYLQEIFSNEMAKVDDSFFHRLEESFLVEEDKKHERHPIFGNIVDEVAYHEKYPTIYHLRKKLVDSTDKADLRLIYLALAHMIKFRGHFLIEGDLNPDNSDVDKLFIQLVQTYNQLFEENPINASGVDAKAILSARLSKSRRLENLIAQLPGEKKNGLFGNLIALSLGLTPNFKSNFDLAEDAKLQLSKDTYDDDLDNLLAQIGDQYADLFLAAKNLSDAILLSDILRVNTEITKAPLSASMIKRYDEHHQDLTLLKALVRQQLPEKYKEIFFDQSKNGYAGYIDGGASQEEFYKFIKPILEKMDGTEELLVKLNREDLLRKQRTFDNGSIPHQIHLGELHAILRRQEDFYPFLKDNREKIEKILTFRIPYYVGPLARGNSRFAWMTRKSEETITPWNFEEVVDKGASAQSFIERMTNFDKNLPNEKVLPKHSLLYEYFTVYNELTKVKYVTEGMRKPAFLSGEQKKAIVDLLFKTNRKVTVKQLKEDYFKKIECFDSVEISGVEDRFNASLGTYHDLLKIIKDKDFLDNEENEDILEDIVLTLTLFEDREMIEERLKTYAHLFDDKVMKQLKRRRYTGWGRLSRKLINGIRDKQSGKTILDFLKSDGFANRNFMQLIHDDSLTFKEDIQKAQVSGQGDSLHEHIANLAGSPAIKKGILQTVKVVDELVKVMGRHKPENIVIEMARENQTTQKGQKNSRERMKRIEEGIKELGSQILKEHPVENTQLQNEKLYLYYLQNGRDMYVDQELDINRLSDYDVDHIVPQSFLKDDSIDNKVLTRSDKARGKSDNVPSEEVVKKMKNYWRQLLNAKLITQRKFDNLTKAERGGLSELDKAGFIKRQLVETRQITKHVAQILDSRMNTKYDENDKLIREVKVITLKSKLVSDFRKDFQFYKVREINNYHHAHDAYLNAVVGTALIKKYPKLESEFVYGDYKVYDVRKMIAKSEQEIGKATAKYFFYSNIMNFFKTEITLANGEIRKRPLIETNGETGEIVWDKGRDFATVRKVLSMPQVNIVKKTEVQTGGFSKESILPKRNSDKLIARKKDWDPKKYGGFDSPTVAYSVLVVAKVEKGKSKKLKSVKELLGITIMERSSFEKNPIDFLEAKGYKEVKKDLIIKLPKYSLFELENGRKRMLASAGELQKGNELALPSKYVNFLYLASHYEKLKGSPEDNEQKQLFVEQHKHYLDEIIEQISEFSKRVILADANLDKVLSAYNKHRDKPIREQAENIIHLFTLTNLGAPAAFKYFDTTIDRKRYTSTKEVLDATLIHQSITGLYETRIDLSQLGGDGGEAAAKGGGGGSGGTLNIEDEYRLHETSKEPDVPLGSTWLSDFPQAWAETGGMGLAVRQAPLIIPLKATSTPVSIKQYPMSQEARLGIKPHIQRLLDQGILVPCQSPWNTPLLPVKKPGTNDYRPVQDLREVNKRVEDIHPTVPNPYNLLSGLPPSHQWYTVLDLKDAFFCLRLHPTSQPLFAFEWRDPEMGISGQLTWTRLPQGFKNSPTLFNEALHRDLADFRIQHPDLILLQYVDDLLLAATSEQDCQRGTRALLQTLGNLGYRASAKKAQICQKQVKYLGYLLKEGQRWLTEARKETVMGQPTPKTPRQLREFLGTAGFCRLWIPGFAEMAAPLYPLTKPGTLFNWGPDQQKAYQEIKQALLTAPALGLPDLTKPFELFVDEKQGYAKGVLTQKLGPWRRPVAYLSKKLDPVAAGWPPCLRMVAAIAVLTKDAGKLTMGQPLVILAPHAVEALVKQPPDRWLSNARMTHYQAMLLDTDRVQFGPVVALNPATLLPLPEKEAPHDCLEILAETHGTRPDLTDQPIPDADYTWYTDGSSFLQEGQRRAGAAVTTETEVIWARALPAGTSAQRAELIALTQALKMAEGKKLNVYTDSRYAFATAHVHGEIYRRRGWLTSEGREIKNKNEILALLKALFLPKRLSIIHCPGHQKGNSAEARGNRMADQAAREAAMKAVLETSTLLAGKRTADGSEFEKRTADGSEFESPKKKAKVE

SEQ ID NO: 6970 - protein, 2096 aa, synthetic construct
MPAAKRVKLDGGDKKYSIGLDIGTNSVGWAVITDEYKVPSKKFKVLGNTDRHSIKKNLIGALLFDSGETAEATRLKRTARRRYTRRKNRICYLQEIFSNEMAKVDDSFFHRLEESFLVEEDKKHERHPIFGNIVDEVAYHEKYPTIYHLRKKLVDSTDKADLRLIYLALAHMIKFRGHFLIEGDLNPDNSDVDKLFIQLVQTYNQLFEENPINASGVDAKAILSARLSKSRRLENLIAQLPGEKKNGLFGNLIALSLGLTPNFKSNFDLAEDAKLQLSKDTYDDDLDNLLAQIGDQYADLFLAAKNLSDAILLSDILRVNTEITKAPLSASMIKRYDEHHQDLTLLKALVRQQLPEKYKEIFFDQSKNGYAGYIDGGASQEEFYKFIKPILEKMDGTEELLVKLNREDLLRKQRTFDNGSIPHQIHLGELHAILRRQEDFYPFLKDNREKIEKILTFRIPYYVGPLARGNSRFAWMTRKSEETITPWNFEEVVDKGASAQSFIERMTNFDKNLPNEKVLPKHSLLYEYFTVYNELTKVKYVTEGMRKPAFLSGEQKKAIVDLLFKTNRKVTVKQLKEDYFKKIECFDSVEISGVEDRFNASLGTYHDLLKIIKDKDFLDNEENEDILEDIVLTLTLFEDREMIEERLKTYAHLFDDKVMKQLKRRRYTGWGRLSRKLINGIRDKQSGKTILDFLKSDGFANRNFMQLIHDDSLTFKEDIQKAQVSGQGDSLHEHIANLAGSPAIKKGILQTVKVVDELVKVMGRHKPENIVIEMARENQTTQKGQKNSRERMKRIEEGIKELGSQILKEHPVENTQLQNEKLYLYYLQNGRDMYVDQELDINRLSDYDVDHIVPQSFLKDDSIDNKVLTRSDKARGKSDNVPSEEVVKKMKNYWRQLLNAKLITQRKFDNLTKAERGGLSELDKAGFIKRQLVETRQITKHVAQILDSRMNTKYDENDKLIREVKVITLKSKLVSDFRKDFQFYKVREINNYHHAHDAYLNAVVGTALIKKYPKLESEFVYGDYKVYDVRKMIAKSEQEIGKATAKYFFYSNIMNFFKTEITLANGEIRKRPLIETNGETGEIVWDKGRDFATVRKVLSMPQVNIVKKTEVQTGGFSKESILPKRNSDKLIARKKDWDPKKYGGFDSPTVAYSVLVVAKVEKGKSKKLKSVKELLGITIMERSSFEKNPIDFLEAKGYKEVKKDLIIKLPKYSLFELENGRKRMLASAGELQKGNELALPSKYVNFLYLASHYEKLKGSPEDNEQKQLFVEQHKHYLDEIIEQISEFSKRVILADANLDKVLSAYNKHRDKPIREQAENIIHLFTLTNLGAPAAFKYFDTTIDRKRYTSTKEVLDATLIHQSITGLYETRIDLSQLGGDGGGGSGGGPAPGGTAPLEEEYRLFLEAPIQNVTLLEQWKREIPKVWAEINPPGLASTQAPIHVQLLSTALPVRVRQYPITLEAKRSLRETIRKFRAAGILRPVHSPWNTPLLPVRKSGTSEYRMVQDLREVNKRVETIHPTVPNPYTLLSLLPPDRIWYSVLDLKDAFFCIPLAPESQLIFAFEWADAEEGESGQLTWTRLPQGFKNSPTLFDEALNRDLQGFRLDHPSVSLLQYVDDLLIAADTQAACLSATRDLLMTLAELGYRVSGKKAQLCQEEVTYLGFKIHKGSRSLSNSRTQAILQIPVPKTKRQVREFLGTIGYCRLWIPGFAELAQPLYAATRGGNDPLVWGEKEEEAFQSLKLALTQPPALALPSLDKPFQLFVEETSGAAKGVLTQALGPWKRPVAYLSKRLDPVAAGWPRCLRAIAAAALLTREASKLTFGQDIEITSSHNLESLLRSPPDKWLTNARITQYQVLLLDPPRVRFKQTAALNPATLLPETDDTLPIHHCLDTLDSLTSTRPDLTDQPLAQAEATLFTDGSSYIRDGKRYAGAAVVTLDSVIWAEPLPIGTSAQKAELIALTKALEWSKDKSVNIYTDSRYAFATLHVHGMIYRERGLLTAGGKAIKNAPEILALLTAVWLPKRVAVMHCKGHQKDDAPTSTGNRRADEVAREVAIRPLSTQATISAGKRTADGSEFEKRTADGSEFESPKKKAKVE

SEQ ID NO: 6971 - protein, 2096 aa, synthetic construct
MPAAKRVKLDGGDKKYSIGLDIGTNSVGWAVITDEYKVPSKKFKVLGNTDRHSIKKNLIGALLFDSGETAEATRLKRTARRRYTRRKNRICYLQEIFSNEMAKVDDSFFHRLEESFLVEEDKKHERHPIFGNIVDEVAYHEKYPTIYHLRKKLVDSTDKADLRLIYLALAHMIKFRGHFLIEGDLNPDNSDVDKLFIQLVQTYNQLFEENPINASGVDAKAILSARLSKSRRLENLIAQLPGEKKNGLFGNLIALSLGLTPNFKSNFDLAEDAKLQLSKDTYDDDLDNLLAQIGDQYADLFLAAKNLSDAILLSDILRVNTEITKAPLSASMIKRYDEHHQDLTLLKALVRQQLPEKYKEIFFDQSKNGYAGYIDGGASQEEFYKFIKPILEKMDGTEELLVKLNREDLLRKQRTFDNGSIPHQIHLGELHAILRRQEDFYPFLKDNREKIEKILTFRIPYYVGPLARGNSRFAWMTRKSEETITPWNFEEVVDKGASAQSFIERMTNFDKNLPNEKVLPKHSLLYEYFTVYNELTKVKYVTEGMRKPAFLSGEQKKAIVDLLFKTNRKVTVKQLKEDYFKKIECFDSVEISGVEDRFNASLGTYHDLLKIIKDKDFLDNEENEDILEDIVLTLTLFEDREMIEERLKTYAHLFDDKVMKQLKRRRYTGWGRLSRKLINGIRDKQSGKTILDFLKSDGFANRNFMQLIHDDSLTFKEDIQKAQVSGQGDSLHEHIANLAGSPAIKKGILQTVKVVDELVKVMGRHKPENIVIEMARENQTTQKGQKNSRERMKRIEEGIKELGSQILKEHPVENTQLQNEKLYLYYLQNGRDMYVDQELDINRLSDYDVDHIVPQSFLKDDSIDNKVLTRSDKARGKSDNVPSEEVVKKMKNYWRQLLNAKLITQRKFDNLTKAERGGLSELDKAGFIKRQLVETRQITKHVAQILDSRMNTKYDENDKLIREVKVITLKSKLVSDFRKDFQFYKVREINNYHHAHDAYLNAVVGTALIKKYPKLESEFVYGDYKVYDVRKMIAKSEQEIGKATAKYFFYSNIMNFFKTEITLANGEIRKRPLIETNGETGEIVWDKGRDFATVRKVLSMPQVNIVKKTEVQTGGFSKESILPKRNSDKLIARKKDWDPKKYGGFDSPTVAYSVLVVAKVEKGKSKKLKSVKELLGITIMERSSFEKNPIDFLEAKGYKEVKKDLIIKLPKYSLFELENGRKRMLASAGELQKGNELALPSKYVNFLYLASHYEKLKGSPEDNEQKQLFVEQHKHYLDEIIEQISEFSKRVILADANLDKVLSAYNKHRDKPIREQAENIIHLFTLTNLGAPAAFKYFDTTIDRKRYTSTKEVLDATLIHQSITGLYETRIDLSQLGGDGGGGSGGGPAPGGTAPLEEEYRLFLEAPIQNVTLLEQWKREIPKVWAEINPPGLASTQAPIHVQLLSTALPVRVRQYPITLEAKRSLRETIRKFRAAGILRPVHSPWNTPLLPVRKSGTSEYRMVQDLREVNKRVETIHPTVPNPYTLLSLLPPDRIWYSVLDLKDAFFCIPLAPESQLIFAFEWADAEEGESGQLTWTRLPQGFKNSPTLFNEALNRDLQGFRLDHPSVSLLQYVDDLLIAADTQAACLSATRDLLMTLAELGYRVSGKKAQLCQEEVTYLGFKIHKGSRSLSNSRTQAILQIPVPKTKRQVREFLGTIGYCRLWIPGFAELAQPLYAATRPGNDPLVWGEKEEEAFQSLKLALTQPPALALPSLDKPFQLFVEETSGAAKGVLTQALGPWKRPVAYLSKRLDPVAAGWPRCLRAIAAAALLTREASKLTFGQDIEITSSHNLESLLRSPPDKWLTNARITQYQVLLLDPPRVRFKQTAALNPATLLPETDDTLPIHHCLDTLDSLTSTRPDLTDQPLAQAEATLFTDGSSYIRDGKRYAGAAVVTLDSVIWAEPLPIGTSAQKAELIALTKALEWSKDKSVNIYTDSRYAFATLHVHGMIYRERGWLTAGGKAIKNAPEILALLTAVWLPKRVAVMHCKGHQKDDAPTSTGNRRADEVAREVAIRPLSTQATISAGKRTADGSEFEKRTADGSEFESPKKKAKVE

SEQ ID NO: 6972 - protein, 2096 aa, synthetic construct
MPAAKRVKLDGGDKKYSIGLDIGTNSVGWAVITDEYKVPSKKFKVLGNTDRHSIKKNLIGALLFDSGETAEATRLKRTARRRYTRRKNRICYLQEIFSNEMAKVDDSFFHRLEESFLVEEDKKHERHPIFGNIVDEVAYHEKYPTIYHLRKKLVDSTDKADLRLIYLALAHMIKFRGHFLIEGDLNPDNSDVDKLFIQLVQTYNQLFEENPINASGVDAKAILSARLSKSRRLENLIAQLPGEKKNGLFGNLIALSLGLTPNFKSNFDLAEDAKLQLSKDTYDDDLDNLLAQIGDQYADLFLAAKNLSDAILLSDILRVNTEITKAPLSASMIKRYDEHHQDLTLLKALVRQQLPEKYKEIFFDQSKNGYAGYIDGGASQEEFYKFIKPILEKMDGTEELLVKLNREDLLRKQRTFDNGSIPHQIHLGELHAILRRQEDFYPFLKDNREKIEKILTFRIPYYVGPLARGNSRFAWMTRKSEETITPWNFEEVVDKGASAQSFIERMTNFDKNLPNEKVLPKHSLLYEYFTVYNELTKVKYVTEGMRKPAFLSGEQKKAIVDLLFKTNRKVTVKQLKEDYFKKIECFDSVEISGVEDRFNASLGTYHDLLKIIKDKDFLDNEENEDILEDIVLTLTLFEDREMIEERLKTYAHLFDDKVMKQLKRRRYTGWGRLSRKLINGIRDKQSGKTILDFLKSDGFANRNFMQLIHDDSLTFKEDIQKAQVSGQGDSLHEHIANLAGSPAIKKGILQTVKVVDELVKVMGRHKPENIVIEMARENQTTQKGQKNSRERMKRIEEGIKELGSQILKEHPVENTQLQNEKLYLYYLQNGRDMYVDQELDINRLSDYDVDHIVPQSFLKDDSIDNKVLTRSDKARGKSDNVPSEEVVKKMKNYWRQLLNAKLITQRKFDNLTKAERGGLSELDKAGFIKRQLVETRQITKHVAQILDSRMNTKYDENDKLIREVKVITLKSKLVSDFRKDFQFYKVREINNYHHAHDAYLNAVVGTALIKKYPKLESEFVYGDYKVYDVRKMIAKSEQEIGKATAKYFFYSNIMNFFKTEITLANGEIRKRPLIETNGETGEIVWDKGRDFATVRKVLSMPQVNIVKKTEVQTGGFSKESILPKRNSDKLIARKKDWDPKKYGGFDSPTVAYSVLVVAKVEKGKSKKLKSVKELLGITIMERSSFEKNPIDFLEAKGYKEVKKDLIIKLPKYSLFELENGRKRMLASAGELQKGNELALPSKYVNFLYLASHYEKLKGSPEDNEQKQLFVEQHKHYLDEIIEQISEFSKRVILADANLDKVLSAYNKHRDKPIREQAENIIHLFTLTNLGAPAAFKYFDTTIDRKRYTSTKEVLDATLIHQSITGLYETRIDLSQLGGDGGGGSGGGPAPGGTAPLEEEYRLFLEAPIQNVTLLEQWKREIPKVWAEINPPGLASTQAPIHVQLLSTALPVRVRQYPITLEAKRSLRETIRKFRAAGILRPVHSPWNTPLLPVRKSGTSEYRMVQDLREVNKRVETIHPTVPNPYTLLSLLPPDRIWYSVLDLKDAFFCIPLAPESQLIFAFEWADAEEGESGQLTWTRLPQGFKNSPTLFNEALNRDLQGFRLDHPSVSLLQYVDDLLIAADTQAACLSATRDLLMTLAELGYRVSGKKAQLCQEEVTYLGFKIHKGSRSLSNSRTQAILQIPVPKTKRQVREFLGKIGYCRLFIPGFAELAQPLYAATRPGNDPLVWGEKEEEAFQSLKLALTQPPALALPSLDKPFQLFVEETSGAAKGVLTQALGPWKRPVAYLSKRLDPVAAGWPRCLRAIAAAALLTREASKLTFGQDIEITSSHNLESLLRSPPDKWLTNARITQYQVLLLDPPRVRFKQTAALNPATLLPETDDTLPIHHCLDTLDSLTSTRPDLTDQPLAQAEATLFTDGSSYIRDGKRYAGAAVVTLDSVIWAEPLPIGTSAQKAELIALTKALEWSKDKSVNIYTDSRYAFATLHVHGMIYRERGWLTAGGKAIKNAPEILALLTAVWLPKRVAVMHCKGHQKDDAPTSTGNRRADEVAREVAIRPLSTQATISAGKRTADGSEFEKRTADGSEFESPKKKAKVE

SEQ ID NO: 6973 - protein, 2100 aa, synthetic construct
MPAAKRVKLDGGDKKYSIGLDIGTNSVGWAVITDEYKVPSKKFKVLGNTDRHSIKKNLIGALLFDSGETAEATRLKRTARRRYTRRKNRICYLQEIFSNEMAKVDDSFFHRLEESFLVEEDKKHERHPIFGNIVDEVAYHEKYPTIYHLRKKLVDSTDKADLRLIYLALAHMIKFRGHFLIEGDLNPDNSDVDKLFIQLVQTYNQLFEENPINASGVDAKAILSARLSKSRRLENLIAQLPGEKKNGLFGNLIALSLGLTPNFKSNFDLAEDAKLQLSKDTYDDDLDNLLAQIGDQYADLFLAAKNLSDAILLSDILRVNTEITKAPLSASMIKRYDEHHQDLTLLKALVRQQLPEKYKEIFFDQSKNGYAGYIDGGASQEEFYKFIKPILEKMDGTEELLVKLNREDLLRKQRTFDNGSIPHQIHLGELHAILRRQEDFYPFLKDNREKIEKILTFRIPYYVGPLARGNSRFAWMTRKSEETITPWNFEEVVDKGASAQSFIERMTNFDKNLPNEKVLPKHSLLYEYFTVYNELTKVKYVTEGMRKPAFLSGEQKKAIVDLLFKTNRKVTVKQLKEDYFKKIECFDSVEISGVEDRFNASLGTYHDLLKIIKDKDFLDNEENEDILEDIVLTLTLFEDREMIEERLKTYAHLFDDKVMKQLKRRRYTGWGRLSRKLINGIRDKQSGKTILDFLKSDGFANRNFMQLIHDDSLTFKEDIQKAQVSGQGDSLHEHIANLAGSPAIKKGILQTVKVVDELVKVMGRHKPENIVIEMARENQTTQKGQKNSRERMKRIEEGIKELGSQILKEHPVENTQLQNEKLYLYYLQNGRDMYVDQELDINRLSDYDVDHIVPQSFLKDDSIDNKVLTRSDKARGKSDNVPSEEVVKKMKNYWRQLLNAKLITQRKFDNLTKAERGGLSELDKAGFIKRQLVETRQITKHVAQILDSRMNTKYDENDKLIREVKVITLKSKLVSDFRKDFQFYKVREINNYHHAHDAYLNAVVGTALIKKYPKLESEFVYGDYKVYDVRKMIAKSEQEIGKATAKYFFYSNIMNFFKTEITLANGEIRKRPLIETNGETGEIVWDKGRDFATVRKVLSMPQVNIVKKTEVQTGGFSKESILPKRNSDKLIARKKDWDPKKYGGFDSPTVAYSVLVVAKVEKGKSKKLKSVKELLGITIMERSSFEKNPIDFLEAKGYKEVKKDLIIKLPKYSLFELENGRKRMLASAGELQKGNELALPSKYVNFLYLASHYEKLKGSPEDNEQKQLFVEQHKHYLDEIIEQISEFSKRVILADANLDKVLSAYNKHRDKPIREQAENIIHLFTLTNLGAPAAFKYFDTTIDRKRYTSTKEVLDATLIHQSITGLYETRIDLSQLGGDGGGGSGGGPAPGGTVSLQDEHRLFDIPVTTSLPDVWLQDFPQAWAETGGLGRAKCQAPIIIDLKPTAVPVSIKQYPMSLEAHMGIRQHIIKFLELGVLRPCRSPWNTPLLPVKKPGTQDYRPVQDLREINKRTVDIHPTVPNPYNLLSTLKPDYSWYTVLDLKDAFFCLPLAPQSQELFAFEWKDPERGISGQLTWTRLPQGFKNSPTLFNEALHRDLTDFRTQHPEVTLLQYVDDLLLAAPTKKACTQGTRHLLQELGEKGYRASAKKAQICQTKVTYLGYILSEGKRWLTPGRIETVARIPPPRNPREVREFLGTAGFCRLWIPGFAELAAPLYALTKPSTPFTWQTEHQLAFEALKKALLSAPALGLPDTSKPFTLFLDERQGIAKGVLTQKLGPWKRPVAYLSKKLDPVAAGWPPCLRIMAATAMLVKDSAKLTLGQPLTVITPHTLEAIVRQPPDRWITNARLTHYQALLLDTDRVQFGPPVTLNPATLLPVPENQPSPHDCRQVLAETHGTREDLKDQELPDADHTWYTDGSSYLDSGTRRAGAAVVDGHNTIWAQSLPPGTSAQKAELIALTKALELSKGKKANIYTDSRYAFATAHTHGSIYERRGWLTSEGKEIKNKAEIIALLKALFLPQEVAIIHCPGHQKGQDPVAVGNRQADRVARQAAMAEVLTLATEPDNTSHITAGKRTADGSEFEKRTADGSEFESPKKKAKVE

SEQ ID NO: 6974 - protein, 2092 aa, synthetic construct
MPAAKRVKLDGGDKKYSIGLDIGTNSVGWAVITDEYKVPSKKFKVLGNTDRHSIKKNLIGALLFDSGETAEATRLKRTARRRYTRRKNRICYLQEIFSNEMAKVDDSFFHRLEESFLVEEDKKHERHPIFGNIVDEVAYHEKYPTIYHLRKKLVDSTDKADLRLIYLALAHMIKFRGHFLIEGDLNPDNSDVDKLFIQLVQTYNQLFEENPINASGVDAKAILSARLSKSRRLENLIAQLPGEKKNGLFGNLIALSLGLTPNFKSNFDLAEDAKLQLSKDTYDDDLDNLLAQIGDQYADLFLAAKNLSDAILLSDILRVNTEITKAPLSASMIKRYDEHHQDLTLLKALVRQQLPEKYKEIFFDQSKNGYAGYIDGGASQEEFYKFIKPILEKMDGTEELLVKLNREDLLRKQRTFDNGSIPHQIHLGELHAILRRQEDFYPFLKDNREKIEKILTFRIPYYVGPLARGNSRFAWMTRKSEETITPWNFEEVVDKGASAQSFIERMTNFDKNLPNEKVLPKHSLLYEYFTVYNELTKVKYVTEGMRKPAFLSGEQKKAIVDLLFKTNRKVTVKQLKEDYFKKIECFDSVEISGVEDRFNASLGTYHDLLKIIKDKDFLDNEENEDILEDIVLTLTLFEDREMIEERLKTYAHLFDDKVMKQLKRRRYTGWGRLSRKLINGIRDKQSGKTILDFLKSDGFANRNFMQLIHDDSLTFKEDIQKAQVSGQGDSLHEHIANLAGSPAIKKGILQTVKVVDELVKVMGRHKPENIVIEMARENQTTQKGQKNSRERMKRIEEGIKELGSQILKEHPVENTQLQNEKLYLYYLQNGRDMYVDQELDINRLSDYDVDHIVPQSFLKDDSIDNKVLTRSDKARGKSDNVPSEEVVKKMKNYWRQLLNAKLITQRKFDNLTKAERGGLSELDKAGFIKRQLVETRQITKHVAQILDSRMNTKYDENDKLIREVKVITLKSKLVSDFRKDFQFYKVREINNYHHAHDAYLNAVVGTALIKKYPKLESEFVYGDYKVYDVRKMIAKSEQEIGKATAKYFFYSNIMNFFKTEITLANGEIRKRPLIETNGETGEIVWDKGRDFATVRKVLSMPQVNIVKKTEVQTGGFSKESILPKRNSDKLIARKKDWDPKKYGGFDSPTVAYSVLVVAKVEKGKSKKLKSVKELLGITIMERSSFEKNPIDFLEAKGYKEVKKDLIIKLPKYSLFELENGRKRMLASAGELQKGNELALPSKYVNFLYLASHYEKLKGSPEDNEQKQLFVEQHKHYLDEIIEQISEFSKRVILADANLDKVLSAYNKHRDKPIREQAENIIHLFTLTNLGAPAAFKYFDTTIDRKRYTSTKEVLDATLIHQSITGLYETRIDLSQLGGDGGGGSGGGPAPGGVLNLEEEYRLHEKPVPSSIDPSWLQLFPTVWAERAGMGLANQVPPVVVELRSGASPVAVRQYPMSKEAREGIRPHIQKFLDLGVLVPCRSPWNTPLLPVKKPGTNDYRPVQDLREINKRVQDIHPTVPNPYNLLSSLPPSYTWYSVLDLKDAFFCLRLHPNSQPLFAFEWKDPEKGNTGQLTWTRLPQGFKNSPTLFNEALHRDLAPFRALNPQVVLLQYVDDLLVAAPTYEDCKKGTQKLLQELSKLGYRVSAKKAQLCQREVTYLGYLLKEGKRWLTPARKATVMKIPVPTTPRQVREFLGTAGFCRLWIPGFASLAAPLYPLTKPSIPFIWTEEHQQAFDHIKKALLSAPALALPDLTKPFTLYIDERAGVARGVLTQTLGPWRRPVAYLSKKLDPVASGWPTCLKAVAAVALLLKDADKLTLGQNVTVIASHSLESIVRQPPDRWMTNARMTHYQSLLLNERVSFAPPAVLNPATLLPVESEATPVHRCSEILAEETGTRRDLEDQPLPGVPTWYTDGSSFITEGKRRAGAPIVDGKRTVWASSLPEGTSAQKAELVALTQALRLAEGKNINIYTDSRYAFATAHIHGAIYKQRGWLTSAGKDIKNKEEILALLEAIHLPRRVAIIHCPGHQRGSNPVATGNRRADEAAKQAALSTRVLAGTTKPAGKRTADGSEFEKRTADGSEFESPKKKAKVE

SEQ ID NO: 6975 - protein, 2092 aa, synthetic construct
MPAAKRVKLDGGDKKYSIGLDIGTNSVGWAVITDEYKVPSKKFKVLGNTDRHSIKKNLIGALLFDSGETAEATRLKRTARRRYTRRKNRICYLQEIFSNEMAKVDDSFFHRLEESFLVEEDKKHERHPIFGNIVDEVAYHEKYPTIYHLRKKLVDSTDKADLRLIYLALAHMIKFRGHFLIEGDLNPDNSDVDKLFIQLVQTYNQLFEENPINASGVDAKAILSARLSKSRRLENLIAQLPGEKKNGLFGNLIALSLGLTPNFKSNFDLAEDAKLQLSKDTYDDDLDNLLAQIGDQYADLFLAAKNLSDAILLSDILRVNTEITKAPLSASMIKRYDEHHQDLTLLKALVRQQLPEKYKEIFFDQSKNGYAGYIDGGASQEEFYKFIKPILEKMDGTEELLVKLNREDLLRKQRTFDNGSIPHQIHLGELHAILRRQEDFYPFLKDNREKIEKILTFRIPYYVGPLARGNSRFAWMTRKSEETITPWNFEEVVDKGASAQSFIERMTNFDKNLPNEKVLPKHSLLYEYFTVYNELTKVKYVTEGMRKPAFLSGEQKKAIVDLLFKTNRKVTVKQLKEDYFKKIECFDSVEISGVEDRFNASLGTYHDLLKIIKDKDFLDNEENEDILEDIVLTLTLFEDREMIEERLKTYAHLFDDKVMKQLKRRRYTGWGRLSRKLINGIRDKQSGKTILDFLKSDGFANRNFMQLIHDDSLTFKEDIQKAQVSGQGDSLHEHIANLAGSPAIKKGILQTVKVVDELVKVMGRHKPENIVIEMARENQTTQKGQKNSRERMKRIEEGIKELGSQILKEHPVENTQLQNEKLYLYYLQNGRDMYVDQELDINRLSDYDVDHIVPQSFLKDDSIDNKVLTRSDKARGKSDNVPSEEVVKKMKNYWRQLLNAKLITQRKFDNLTKAERGGLSELDKAGFIKRQLVETRQITKHVAQILDSRMNTKYDENDKLIREVKVITLKSKLVSDFRKDFQFYKVREINNYHHAHDAYLNAVVGTALIKKYPKLESEFVYGDYKVYDVRKMIAKSEQEIGKATAKYFFYSNIMNFFKTEITLANGEIRKRPLIETNGETGEIVWDKGRDFATVRKVLSMPQVNIVKKTEVQTGGFSKESILPKRNSDKLIARKKDWDPKKYGGFDSPTVAYSVLVVAKVEKGKSKKLKSVKELLGITIMERSSFEKNPIDFLEAKGYKEVKKDLIIKLPKYSLFELENGRKRMLASAGELQKGNELALPSKYVNFLYLASHYEKLKGSPEDNEQKQLFVEQHKHYLDEIIEQISEFSKRVILADANLDKVLSAYNKHRDKPIREQAENIIHLFTLTNLGAPAAFKYFDTTIDRKRYTSTKEVLDATLIHQSITGLYETRIDLSQLGGDGGGGSGGGPAPGGVLNLEEEYRLHEKPVPSSIDPSWLQLFPTVWAERAGMGLANQVPPVVVELRSGASPVAVRQYPMSKEAREGIRPHIQKFLDLGVLVPCRSPWNTPLLPVKKPGTNDYRPVQDLREINKRVQDIHPTVPNPYNLLSSLPPSYTWYSVLDLKDAFFCLRLHPNSQPLFAFEWKDPEKGNTGQLTWTRLPQGFKNSPTLFNEALHRDLAPFRALNPQVVLLQYVDDLLVAAPTYEDCKKGTQKLLQELSKLGYRVSAKKAQLCQREVTYLGYLLKEGKRWLTPARKATVMKIPVPTTPRQVREFLGKAGFCRLFIPGFASLAAPLYPLTKPSIPFIWTEEHQQAFDHIKKALLSAPALALPDLTKPFTLYIDERAGVARGVLTQTLGPWRRPVAYLSKKLDPVASGWPTCLKAVAAVALLLKDADKLTLGQNVTVIASHSLESIVRQPPDRWMTNARMTHYQSLLLNERVSFAPPAVLNPATLLPVESEATPVHRCSEILAEETGTRRDLEDQPLPGVPTWYTDGSSFITEGKRRAGAPIVDGKRTVWASSLPEGTSAQKAELVALTQALRLAEGKNINIYTDSRYAFATAHIHGAIYKQRGWLTSAGKDIKNKEEILALLEAIHLPRRVAIIHCPGHQRGSNPVATGNRRADEAAKQAALSTRVLAGTTKPAGKRTADGSEFEKRTADGSEFESPKKKAKVE

SEQ ID NO: 6976 - protein, 2125 aa, synthetic construct
MPAAKRVKLDGGDKKYSIGLDIGTNSVGWAVITDEYKVPSKKFKVLGNTDRHSIKKNLIGALLFDSGETAEATRLKRTARRRYTRRKNRICYLQEIFSNEMAKVDDSFFHRLEESFLVEEDKKHERHPIFGNIVDEVAYHEKYPTIYHLRKKLVDSTDKADLRLIYLALAHMIKFRGHFLIEGDLNPDNSDVDKLFIQLVQTYNQLFEENPINASGVDAKAILSARLSKSRRLENLIAQLPGEKKNGLFGNLIALSLGLTPNFKSNFDLAEDAKLQLSKDTYDDDLDNLLAQIGDQYADLFLAAKNLSDAILLSDILRVNTEITKAPLSASMIKRYDEHHQDLTLLKALVRQQLPEKYKEIFFDQSKNGYAGYIDGGASQEEFYKFIKPILEKMDGTEELLVKLNREDLLRKQRTFDNGSIPHQIHLGELHAILRRQEDFYPFLKDNREKIEKILTFRIPYYVGPLARGNSRFAWMTRKSEETITPWNFEEVVDKGASAQSFIERMTNFDKNLPNEKVLPKHSLLYEYFTVYNELTKVKYVTEGMRKPAFLSGEQKKAIVDLLFKTNRKVTVKQLKEDYFKKIECFDSVEISGVEDRFNASLGTYHDLLKIIKDKDFLDNEENEDILEDIVLTLTLFEDREMIEERLKTYAHLFDDKVMKQLKRRRYTGWGRLSRKLINGIRDKQSGKTILDFLKSDGFANRNFMQLIHDDSLTFKEDIQKAQVSGQGDSLHEHIANLAGSPAIKKGILQTVKVVDELVKVMGRHKPENIVIEMARENQTTQKGQKNSRERMKRIEEGIKELGSQILKEHPVENTQLQNEKLYLYYLQNGRDMYVDQELDINRLSDYDVDHIVPQSFLKDDSIDNKVLTRSDKARGKSDNVPSEEVVKKMKNYWRQLLNAKLITQRKFDNLTKAERGGLSELDKAGFIKRQLVETRQITKHVAQILDSRMNTKYDENDKLIREVKVITLKSKLVSDFRKDFQFYKVREINNYHHAHDAYLNAVVGTALIKKYPKLESEFVYGDYKVYDVRKMIAKSEQEIGKATAKYFFYSNIMNFFKTEITLANGEIRKRPLIETNGETGEIVWDKGRDFATVRKVLSMPQVNIVKKTEVQTGGFSKESILPKRNSDKLIARKKDWDPKKYGGFDSPTVAYSVLVVAKVEKGKSKKLKSVKELLGITIMERSSFEKNPIDFLEAKGYKEVKKDLIIKLPKYSLFELENGRKRMLASAGELQKGNELALPSKYVNFLYLASHYEKLKGSPEDNEQKQLFVEQHKHYLDEIIEQISEFSKRVILADANLDKVLSAYNKHRDKPIREQAENIIHLFTLTNLGAPAAFKYFDTTIDRKRYTSTKEVLDATLIHQSITGLYETRIDLSQLGGDGGGGSGGGPAPGGLLGRDLLTKLKAQIQFSTEGPQVTWEDRPAMCLVLNLEEEYRLHEKPVPPSIDPSWLQLFPMVWAEKAGMGLANQVPPVVVELKSDASPVAVRQYPMSKEAREGIRPHIQRFLDLGILVPCQSPWNTPLLPVKKPGTNDYRPVQDLREVNKRVQDIHPTVPNPYNLLSSLPPSHTWYSVLDLKDAFFCLKLHPNSQPLFAFEWRDPEKGNTGQLTWTRLPQGFKNSPTLFNEALHRDLASFRALNPQVVMLQYVDDLLVAAPTYRDCKEGTRRLLQELSKLGYRVSAKKAQLCREEVTYLGYLLKGGKRWLTPARKATVMKIPTPTTPRQVREFLGTAGFCRLWIPGFASLAAPLYPLTRPKVPFTWTEAHQEAFGRIKEALLSAPALALPDLTKPFALYVDEKEGVARGVLTQTLGPWRRPVAYLSKKLDPVASGWPTCLKAIAAVALLLKDADKLTLGQNVLVIAPHNLESIVRQPPDRWMTNARMTHYQSLLLNERVSFAPPAILNPATLLPVESDDTPIHICSEILAEETGTRPDLRDQPLPGVPAWYTDGSSFIMDGRRQAGAAIVDNKRTVWASNLPEGTSAQKAELIALTQALRLAEGKSINIYTDSRYAFATAHVHGAIYKQRGWLTSAGKDIKNKEEILALLEAIHLPKRVAIIHCPGHQRGTDPVATGNRKADEAAKQAAQSTRILTETTKNAGKRTADGSEFEKRTADGSEFESPKKKAKVE

SEQ ID NO: 6977 - protein, 2125 aa, synthetic construct
MPAAKRVKLDGGDKKYSIGLDIGTNSVGWAVITDEYKVPSKKFKVLGNTDRHSIKKNLIGALLFDSGETAEATRLKRTARRRYTRRKNRICYLQEIFSNEMAKVDDSFFHRLEESFLVEEDKKHERHPIFGNIVDEVAYHEKYPTIYHLRKKLVDSTDKADLRLIYLALAHMIKFRGHFLIEGDLNPDNSDVDKLFIQLVQTYNQLFEENPINASGVDAKAILSARLSKSRRLENLIAQLPGEKKNGLFGNLIALSLGLTPNFKSNFDLAEDAKLQLSKDTYDDDLDNLLAQIGDQYADLFLAAKNLSDAILLSDILRVNTEITKAPLSASMIKRYDEHHQDLTLLKALVRQQLPEKYKEIFFDQSKNGYAGYIDGGASQEEFYKFIKPILEKMDGTEELLVKLNREDLLRKQRTFDNGSIPHQIHLGELHAILRRQEDFYPFLKDNREKIEKILTFRIPYYVGPLARGNSRFAWMTRKSEETITPWNFEEVVDKGASAQSFIERMTNFDKNLPNEKVLPKHSLLYEYFTVYNELTKVKYVTEGMRKPAFLSGEQKKAIVDLLFKTNRKVTVKQLKEDYFKKIECFDSVEISGVEDRFNASLGTYHDLLKIIKDKDFLDNEENEDILEDIVLTLTLFEDREMIEERLKTYAHLFDDKVMKQLKRRRYTGWGRLSRKLINGIRDKQSGKTILDFLKSDGFANRNFMQLIHDDSLTFKEDIQKAQVSGQGDSLHEHIANLAGSPAIKKGILQTVKVVDELVKVMGRHKPENIVIEMARENQTTQKGQKNSRERMKRIEEGIKELGSQILKEHPVENTQLQNEKLYLYYLQNGRDMYVDQELDINRLSDYDVDHIVPQSFLKDDSIDNKVLTRSDKARGKSDNVPSEEVVKKMKNYWRQLLNAKLITQRKFDNLTKAERGGLSELDKAGFIKRQLVETRQITKHVAQILDSRMNTKYDENDKLIREVKVITLKSKLVSDFRKDFQFYKVREINNYHHAHDAYLNAVVGTALIKKYPKLESEFVYGDYKVYDVRKMIAKSEQEIGKATAKYFFYSNIMNFFKTEITLANGEIRKRPLIETNGETGEIVWDKGRDFATVRKVLSMPQVNIVKKTEVQTGGFSKESILPKRNSDKLIARKKDWDPKKYGGFDSPTVAYSVLVVAKVEKGKSKKLKSVKELLGITIMERSSFEKNPIDFLEAKGYKEVKKDLIIKLPKYSLFELENGRKRMLASAGELQKGNELALPSKYVNFLYLASHYEKLKGSPEDNEQKQLFVEQHKHYLDEIIEQISEFSKRVILADANLDKVLSAYNKHRDKPIREQAENIIHLFTLTNLGAPAAFKYFDTTIDRKRYTSTKEVLDATLIHQSITGLYETRIDLSQLGGDGGGGSGGGPAPGGLLGRDLLTKLKAQIQFSTEGPQVTWEDRPAMCLVLNLEEEYRLHEKPVPPSIDPSWLQLFPMVWAEKAGMGLANQVPPVVVELKSDASPVAVRQYPMSKEAREGIRPHIQRFLDLGILVPCQSPWNTPLLPVKKPGTNDYRPVQDLREVNKRVQDIHPTVPNPYNLLSSLPPSHTWYSVLDLKDAFFCLKLHPNSQPLFAFEWRDPEKGNTGQLTWTRLPQGFKNSPTLFNEALHRDLASFRALNPQVVMLQYVDDLLVAAPTYRDCKEGTRRLLQELSKLGYRVSAKKAQLCREEVTYLGYLLKGGKRWLTPARKATVMKIPTPTTPRQVREFLGKAGFCRLFIPGFASLAAPLYPLTRPKVPFTWTEAHQEAFGRIKEALLSAPALALPDLTKPFALYVDEKEGVARGVLTQTLGPWRRPVAYLSKKLDPVASGWPTCLKAIAAVALLLKDADKLTLGQNVLVIAPHNLESIVRQPPDRWMTNARMTHYQSLLLNERVSFAPPAILNPATLLPVESDDTPIHICSEILAEETGTRPDLRDQPLPGVPAWYTDGSSFIMDGRRQAGAAIVDNKRTVWASNLPEGTSAQKAELIALTQALRLAEGKSINIYTDSRYAFATAHVHGAIYKQRGWLTSAGKDIKNKEEILALLEAIHLPKRVAIIHCPGHQRGTDPVATGNRKADEAAKQAAQSTRILTETTKNAGKRTADGSEFEKRTADGSEFESPKKKAKVE

SEQ ID NO: 6978 - protein, 2094 aa, synthetic construct
MPAAKRVKLDGGDKKYSIGLDIGTNSVGWAVITDEYKVPSKKFKVLGNTDRHSIKKNLIGALLFDSGETAEATRLKRTARRRYTRRKNRICYLQEIFSNEMAKVDDSFFHRLEESFLVEEDKKHERHPIFGNIVDEVAYHEKYPTIYHLRKKLVDSTDKADLRLIYLALAHMIKFRGHFLIEGDLNPDNSDVDKLFIQLVQTYNQLFEENPINASGVDAKAILSARLSKSRRLENLIAQLPGEKKNGLFGNLIALSLGLTPNFKSNFDLAEDAKLQLSKDTYDDDLDNLLAQIGDQYADLFLAAKNLSDAILLSDILRVNTEITKAPLSASMIKRYDEHHQDLTLLKALVRQQLPEKYKEIFFDQSKNGYAGYIDGGASQEEFYKFIKPILEKMDGTEELLVKLNREDLLRKQRTFDNGSIPHQIHLGELHAILRRQEDFYPFLKDNREKIEKILTFRIPYYVGPLARGNSRFAWMTRKSEETITPWNFEEVVDKGASAQSFIERMTNFDKNLPNEKVLPKHSLLYEYFTVYNELTKVKYVTEGMRKPAFLSGEQKKAIVDLLFKTNRKVTVKQLKEDYFKKIECFDSVEISGVEDRFNASLGTYHDLLKIIKDKDFLDNEENEDILEDIVLTLTLFEDREMIEERLKTYAHLFDDKVMKQLKRRRYTGWGRLSRKLINGIRDKQSGKTILDFLKSDGFANRNFMQLIHDDSLTFKEDIQKAQVSGQGDSLHEHIANLAGSPAIKKGILQTVKVVDELVKVMGRHKPENIVIEMARENQTTQKGQKNSRERMKRIEEGIKELGSQILKEHPVENTQLQNEKLYLYYLQNGRDMYVDQELDINRLSDYDVDHIVPQSFLKDDSIDNKVLTRSDKARGKSDNVPSEEVVKKMKNYWRQLLNAKLITQRKFDNLTKAERGGLSELDKAGFIKRQLVETRQITKHVAQILDSRMNTKYDENDKLIREVKVITLKSKLVSDFRKDFQFYKVREINNYHHAHDAYLNAVVGTALIKKYPKLESEFVYGDYKVYDVRKMIAKSEQEIGKATAKYFFYSNIMNFFKTEITLANGEIRKRPLIETNGETGEIVWDKGRDFATVRKVLSMPQVNIVKKTEVQTGGFSKESILPKRNSDKLIARKKDWDPKKYGGFDSPTVAYSVLVVAKVEKGKSKKLKSVKELLGITIMERSSFEKNPIDFLEAKGYKEVKKDLIIKLPKYSLFELENGRKRMLASAGELQKGNELALPSKYVNFLYLASHYEKLKGSPEDNEQKQLFVEQHKHYLDEIIEQISEFSKRVILADANLDKVLSAYNKHRDKPIREQAENIIHLFTLTNLGAPAAFKYFDTTIDRKRYTSTKEVLDATLIHQSITGLYETRIDLSQLGGDGGGGSGGGPAPGGTLNLEDEYRLYETSAEPEVSPGSTWLSDFPQAWAETGGMGLAVRQAPLIIPLKATSTPVSIKQYPMSQEAKLGIKPHIQRLLDQGILVPCQSPWNTPLLPVKKPGTNDYRPVQDLREVNKRVEDIHPTVPNPYNLLSGLPPSHRWYTVLDLKDAFFCLRLHPTSQPLFAFEWRDPGMGISGQLTWTRLPQGFKNSPTLFNEALHRDLADFRIQHPDLILLQYVDDILLAATSELDCQQGTRALLLTLGNLGYRASAKKAQLCQKQVKYLGYLLKEGQRWLTEARKETVMGQPTPKTPRQLREFLGTAGFCRLWIPGFAEMAAPLYPLTKPGTLFNWGPDQQKAYQEIKQALLTAPALGLPDLTKPFELFVDEKQGYAKGVLTQKLGPWRRPVAYLSKKLDPVAAGWPPCLRMVAAIAVLRKDAGKLTMGQPLVILAPHAVEALVKQPPDRWLSNARMTHYQAMLLDTDRVQFGPVVALNPATLLPLPEEGAPHDCLEILAETHGTRPDLTDQPIPDADHTWYTDGSSFLQEGQRKAGAAVTTETEVIWARALPAGTSAQRAELIALTQALKMAEGKRLNVYTDSRYAFATAHIHGEIYRRRGWLTSEGREIKNKSEILALLKALFLPKRLSIIHCLGHQKGDSAEARGNRLADQAAREAAIKTPPDTSTLLAGKRTADGSEFEKRTADGSEFESPKKKAKVE

SEQ ID NO: 6979 - protein, 2094 aa, synthetic construct
MPAAKRVKLDGGDKKYSIGLDIGTNSVGWAVITDEYKVPSKKFKVLGNTDRHSIKKNLIGALLFDSGETAEATRLKRTARRRYTRRKNRICYLQEIFSNEMAKVDDSFFHRLEESFLVEEDKKHERHPIFGNIVDEVAYHEKYPTIYHLRKKLVDSTDKADLRLIYLALAHMIKFRGHFLIEGDLNPDNSDVDKLFIQLVQTYNQLFEENPINASGVDAKAILSARLSKSRRLENLIAQLPGEKKNGLFGNLIALSLGLTPNFKSNFDLAEDAKLQLSKDTYDDDLDNLLAQIGDQYADLFLAAKNLSDAILLSDILRVNTEITKAPLSASMIKRYDEHHQDLTLLKALVRQQLPEKYKEIFFDQSKNGYAGYIDGGASQEEFYKFIKPILEKMDGTEELLVKLNREDLLRKQRTFDNGSIPHQIHLGELHAILRRQEDFYPFLKDNREKIEKILTFRIPYYVGPLARGNSRFAWMTRKSEETITPWNFEEVVDKGASAQSFIERMTNFDKNLPNEKVLPKHSLLYEYFTVYNELTKVKYVTEGMRKPAFLSGEQKKAIVDLLFKTNRKVTVKQLKEDYFKKIECFDSVEISGVEDRFNASLGTYHDLLKIIKDKDFLDNEENEDILEDIVLTLTLFEDREMIEERLKTYAHLFDDKVMKQLKRRRYTGWGRLSRKLINGIRDKQSGKTILDFLKSDGFANRNFMQLIHDDSLTFKEDIQKAQVSGQGDSLHEHIANLAGSPAIKKGILQTVKVVDELVKVMGRHKPENIVIEMARENQTTQKGQKNSRERMKRIEEGIKELGSQILKEHPVENTQLQNEKLYLYYLQNGRDMYVDQELDINRLSDYDVDHIVPQSFLKDDSIDNKVLTRSDKARGKSDNVPSEEVVKKMKNYWRQLLNAKLITQRKFDNLTKAERGGLSELDKAGFIKRQLVETRQITKHVAQILDSRMNTKYDENDKLIREVKVITLKSKLVSDFRKDFQFYKVREINNYHHAHDAYLNAVVGTALIKKYPKLESEFVYGDYKVYDVRKMIAKSEQEIGKATAKYFFYSNIMNFFKTEITLANGEIRKRPLIETNGETGEIVWDKGRDFATVRKVLSMPQVNIVKKTEVQTGGFSKESILPKRNSDKLIARKKDWDPKKYGGFDSPTVAYSVLVVAKVEKGKSKKLKSVKELLGITIMERSSFEKNPIDFLEAKGYKEVKKDLIIKLPKYSLFELENGRKRMLASAGELQKGNELALPSKYVNFLYLASHYEKLKGSPEDNEQKQLFVEQHKHYLDEIIEQISEFSKRVILADANLDKVLSAYNKHRDKPIREQAENIIHLFTLTNLGAPAAFKYFDTTIDRKRYTSTKEVLDATLIHQSITGLYETRIDLSQLGGDGGGGSGGGPAPGGTLNLEDEYRLYETSAEPEVSPGSTWLSDFPQAWAETGGMGLAVRQAPLIIPLKATSTPVSIKQYPMSQEAKLGIKPHIQRLLDQGILVPCQSPWNTPLLPVKKPGTNDYRPVQDLREVNKRVEDIHPTVPNPYNLLSGLPPSHRWYTVLDLKDAFFCLRLHPTSQPLFAFEWRDPGMGISGQLTWTRLPQGFKNSPTLFNEALHRDLADFRIQHPDLILLQYVDDILLAATSELDCQQGTRALLLTLGNLGYRASAKKAQLCQKQVKYLGYLLKEGQRWLTEARKETVMGQPTPKTPRQLREFLGKAGFCRLFIPGFAEMAAPLYPLTKPGTLFNWGPDQQKAYQEIKQALLTAPALGLPDLTKPFELFVDEKQGYAKGVLTQKLGPWRRPVAYLSKKLDPVAAGWPPCLRMVAAIAVLRKDAGKLTMGQPLVILAPHAVEALVKQPPDRWLSNARMTHYQAMLLDTDRVQFGPVVALNPATLLPLPEEGAPHDCLEILAETHGTRPDLTDQPIPDADHTWYTDGSSFLQEGQRKAGAAVTTETEVIWARALPAGTSAQRAELIALTQALKMAEGKRLNVYTDSRYAFATAHIHGEIYRRRGWLTSEGREIKNKSEILALLKALFLPKRLSIIHCLGHQKGDSAEARGNRLADQAAREAAIKTPPDTSTLLAGKRTADGSEFEKRTADGSEFESPKKKAKVE

SEQ ID NO: 6980 - protein, 2094 aa, synthetic construct
MPAAKRVKLDGGDKKYSIGLDIGTNSVGWAVITDEYKVPSKKFKVLGNTDRHSIKKNLIGALLFDSGETAEATRLKRTARRRYTRRKNRICYLQEIFSNEMAKVDDSFFHRLEESFLVEEDKKHERHPIFGNIVDEVAYHEKYPTIYHLRKKLVDSTDKADLRLIYLALAHMIKFRGHFLIEGDLNPDNSDVDKLFIQLVQTYNQLFEENPINASGVDAKAILSARLSKSRRLENLIAQLPGEKKNGLFGNLIALSLGLTPNFKSNFDLAEDAKLQLSKDTYDDDLDNLLAQIGDQYADLFLAAKNLSDAILLSDILRVNTEITKAPLSASMIKRYDEHHQDLTLLKALVRQQLPEKYKEIFFDQSKNGYAGYIDGGASQEEFYKFIKPILEKMDGTEELLVKLNREDLLRKQRTFDNGSIPHQIHLGELHAILRRQEDFYPFLKDNREKIEKILTFRIPYYVGPLARGNSRFAWMTRKSEETITPWNFEEVVDKGASAQSFIERMTNFDKNLPNEKVLPKHSLLYEYFTVYNELTKVKYVTEGMRKPAFLSGEQKKAIVDLLFKTNRKVTVKQLKEDYFKKIECFDSVEISGVEDRFNASLGTYHDLLKIIKDKDFLDNEENEDILEDIVLTLTLFEDREMIEERLKTYAHLFDDKVMKQLKRRRYTGWGRLSRKLINGIRDKQSGKTILDFLKSDGFANRNFMQLIHDDSLTFKEDIQKAQVSGQGDSLHEHIANLAGSPAIKKGILQTVKVVDELVKVMGRHKPENIVIEMARENQTTQKGQKNSRERMKRIEEGIKELGSQILKEHPVENTQLQNEKLYLYYLQNGRDMYVDQELDINRLSDYDVDHIVPQSFLKDDSIDNKVLTRSDKARGKSDNVPSEEVVKKMKNYWRQLLNAKLITQRKFDNLTKAERGGLSELDKAGFIKRQLVETRQITKHVAQILDSRMNTKYDENDKLIREVKVITLKSKLVSDFRKDFQFYKVREINNYHHAHDAYLNAVVGTALIKKYPKLESEFVYGDYKVYDVRKMIAKSEQEIGKATAKYFFYSNIMNFFKTEITLANGEIRKRPLIETNGETGEIVWDKGRDFATVRKVLSMPQVNIVKKTEVQTGGFSKESILPKRNSDKLIARKKDWDPKKYGGFDSPTVAYSVLVVAKVEKGKSKKLKSVKELLGITIMERSSFEKNPIDFLEAKGYKEVKKDLIIKLPKYSLFELENGRKRMLASAGELQKGNELALPSKYVNFLYLASHYEKLKGSPEDNEQKQLFVEQHKHYLDEIIEQISEFSKRVILADANLDKVLSAYNKHRDKPIREQAENIIHLFTLTNLGAPAAFKYFDTTIDRKRYTSTKEVLDATLIHQSITGLYETRIDLSQLGGDGGGGSGGGPAPGGTLNIEDEYRLHETSKGPDVPLGSTWLSDFPQAWAETGGMGLAVRQAPLIIPLKATSTPVSIKQYPMSQEARLGIKPHIQRLLDQGILVPCQSPWNTPLLPVKKPGTNDYRPVQDLREVNKRVEDIHPTVPNPYNLLSGLPPSHQWYTVLDLKDAFFCLRLHPTSQSLFAFEWRDPEMGISGQLTWTRLPQGFKNSPTLFNEALHRDLADFRIQHPDLILLQYVDDLLLAATSELDCQQGTRALLQTLGDLGYRASAKKAQICQKQVKYLGYLLKEGQRWLTEARKETVMGQPTPKTPRQLREFLGKAGFCRLFIPGFAEMAAPLYPLTKPGTLFEWGPDQQKAYQEIKQALLTAPALGLPDLTKPFELFVDEKQGYAKGVLTQKLGPWRRPVAYLSKKLDPVAAGWPPCLRMVAAIAVLTKDAGKLTMGQPLVILAPHAVEALVKQPPDRWLSNARMTHYQALLLDTDRVQFGPIVALNPATLLPLPEEGLQHDCLDILAEAHGTRPDLTDQPLPDADHTWYTDGSSFLQEGQRKAGAAVTTETEVVWAKALPAGTSAQRAELIALTQALKMAEGKKLNVYTDSRYAFATAHIHGEIYRRRGWLTSEGKEIKNKDEILALLKALFLPKRLSIIHCPGHQKGNRAEARGNRMADQAAREVATRETPETSTLLAGKRTADGSEFEKRTADGSEFESPKKKAKVE

SEQ ID NO: 6981 - protein, 2114 aa, synthetic construct
MPAAKRVKLDGGDKKYSIGLDIGTNSVGWAVITDEYKVPSKKFKVLGNTDRHSIKKNLIGALLFDSGETAEATRLKRTARRRYTRRKNRICYLQEIFSNEMAKVDDSFFHRLEESFLVEEDKKHERHPIFGNIVDEVAYHEKYPTIYHLRKKLVDSTDKADLRLIYLALAHMIKFRGHFLIEGDLNPDNSDVDKLFIQLVQTYNQLFEENPINASGVDAKAILSARLSKSRRLENLIAQLPGEKKNGLFGNLIALSLGLTPNFKSNFDLAEDAKLQLSKDTYDDDLDNLLAQIGDQYADLFLAAKNLSDAILLSDILRVNTEITKAPLSASMIKRYDEHHQDLTLLKALVRQQLPEKYKEIFFDQSKNGYAGYIDGGASQEEFYKFIKPILEKMDGTEELLVKLNREDLLRKQRTFDNGSIPHQIHLGELHAILRRQEDFYPFLKDNREKIEKILTFRIPYYVGPLARGNSRFAWMTRKSEETITPWNFEEVVDKGASAQSFIERMTNFDKNLPNEKVLPKHSLLYEYFTVYNELTKVKYVTEGMRKPAFLSGEQKKAIVDLLFKTNRKVTVKQLKEDYFKKIECFDSVEISGVEDRFNASLGTYHDLLKIIKDKDFLDNEENEDILEDIVLTLTLFEDREMIEERLKTYAHLFDDKVMKQLKRRRYTGWGRLSRKLINGIRDKQSGKTILDFLKSDGFANRNFMQLIHDDSLTFKEDIQKAQVSGQGDSLHEHIANLAGSPAIKKGILQTVKVVDELVKVMGRHKPENIVIEMARENQTTQKGQKNSRERMKRIEEGIKELGSQILKEHPVENTQLQNEKLYLYYLQNGRDMYVDQELDINRLSDYDVDHIVPQSFLKDDSIDNKVLTRSDKARGKSDNVPSEEVVKKMKNYWRQLLNAKLITQRKFDNLTKAERGGLSELDKAGFIKRQLVETRQITKHVAQILDSRMNTKYDENDKLIREVKVITLKSKLVSDFRKDFQFYKVREINNYHHAHDAYLNAVVGTALIKKYPKLESEFVYGDYKVYDVRKMIAKSEQEIGKATAKYFFYSNIMNFFKTEITLANGEIRKRPLIETNGETGEIVWDKGRDFATVRKVLSMPQVNIVKKTEVQTGGFSKESILPKRNSDKLIARKKDWDPKKYGGFDSPTVAYSVLVVAKVEKGKSKKLKSVKELLGITIMERSSFEKNPIDFLEAKGYKEVKKDLIIKLPKYSLFELENGRKRMLASAGELQKGNELALPSKYVNFLYLASHYEKLKGSPEDNEQKQLFVEQHKHYLDEIIEQISEFSKRVILADANLDKVLSAYNKHRDKPIREQAENIIHLFTLTNLGAPAAFKYFDTTIDRKRYTSTKEVLDATLIHQSITGLYETRIDLSQLGGDGGGGSGGGPAPGGVQEISDSRPMLHIYLNGRRFLGLLDTGADKTCIAGRDWPANWPIHQTESSLQGLGMACGVARSSQPLRWQHEDKSGIIHPFVIPTLPFTLWGRDIMKDIKVRLMTDSPDDSQDLMIGAIESNLFADQISWKSDQPVWLNQWPLKQEKLQALQQLVTEQLQLGHLEESNSPWNTPVFVIKKKSGKWRLLQDLRAVNATMHDMGALQPGLPSPPAVPKGWEIIIIDLQDCFFNIKLHPEDCKRFAFSVPSPNFKRPYQRFQWKVLPQGMKNSPTLCQKFVDKAILTVRDKYQDSYIVHYMDDILLAHPSRSIVDEILTSMIQALNKHGLVVSTEKIQKYDNLKYLGTHIQGDSVSYQKLQIRTDKLRTLNDFQKLLGNINWIRPFLKLTTGELKPLFEILNPDSNPISTRKLTPEACKALQLMNERLSTARVKRLDLSQPWSLCILKTEYTPTACLWQDGVVEWIHLPHISPKVITPYDIFCTQLIIKGRHRSKELFSKDPDYIVVPYTKVQFDLLLQEKEDWPISLLGFLGEVHFHLPKDPLLTFTLQTAIIFPHMTSTTPLEKGIVIFTDGSANGRSVTYIQGREPIIKENTQNTAQQAEIVAVITAFEEVSQPFNLYTDSKYVTGLFPEIETATLSPRTKIYTELKHLQRLIHKRQEKFYIGHIRGHTGLPGPLAQGNAYADSLTRILTAAGKRTADGSEFEKRTADGSEFESPKKKAKVE

SEQ ID NO: 6982 - protein, 2088 aa, synthetic construct
MPAAKRVKLDGGDKKYSIGLDIGTNSVGWAVITDEYKVPSKKFKVLGNTDRHSIKKNLIGALLFDSGETAEATRLKRTARRRYTRRKNRICYLQEIFSNEMAKVDDSFFHRLEESFLVEEDKKHERHPIFGNIVDEVAYHEKYPTIYHLRKKLVDSTDKADLRLIYLALAHMIKFRGHFLIEGDLNPDNSDVDKLFIQLVQTYNQLFEENPINASGVDAKAILSARLSKSRRLENLIAQLPGEKKNGLFGNLIALSLGLTPNFKSNFDLAEDAKLQLSKDTYDDDLDNLLAQIGDQYADLFLAAKNLSDAILLSDILRVNTEITKAPLSASMIKRYDEHHQDLTLLKALVRQQLPEKYKEIFFDQSKNGYAGYIDGGASQEEFYKFIKPILEKMDGTEELLVKLNREDLLRKQRTFDNGSIPHQIHLGELHAILRRQEDFYPFLKDNREKIEKILTFRIPYYVGPLARGNSRFAWMTRKSEETITPWNFEEVVDKGASAQSFIERMTNFDKNLPNEKVLPKHSLLYEYFTVYNELTKVKYVTEGMRKPAFLSGEQKKAIVDLLFKTNRKVTVKQLKEDYFKKIECFDSVEISGVEDRFNASLGTYHDLLKIIKDKDFLDNEENEDILEDIVLTLTLFEDREMIEERLKTYAHLFDDKVMKQLKRRRYTGWGRLSRKLINGIRDKQSGKTILDFLKSDGFANRNFMQLIHDDSLTFKEDIQKAQVSGQGDSLHEHIANLAGSPAIKKGILQTVKVVDELVKVMGRHKPENIVIEMARENQTTQKGQKNSRERMKRIEEGIKELGSQILKEHPVENTQLQNEKLYLYYLQNGRDMYVDQELDINRLSDYDVDHIVPQSFLKDDSIDNKVLTRSDKARGKSDNVPSEEVVKKMKNYWRQLLNAKLITQRKFDNLTKAERGGLSELDKAGFIKRQLVETRQITKHVAQILDSRMNTKYDENDKLIREVKVITLKSKLVSDFRKDFQFYKVREINNYHHAHDAYLNAVVGTALIKKYPKLESEFVYGDYKVYDVRKMIAKSEQEIGKATAKYFFYSNIMNFFKTEITLANGEIRKRPLIETNGETGEIVWDKGRDFATVRKVLSMPQVNIVKKTEVQTGGFSKESILPKRNSDKLIARKKDWDPKKYGGFDSPTVAYSVLVVAKVEKGKSKKLKSVKELLGITIMERSSFEKNPIDFLEAKGYKEVKKDLIIKLPKYSLFELENGRKRMLASAGELQKGNELALPSKYVNFLYLASHYEKLKGSPEDNEQKQLFVEQHKHYLDEIIEQISEFSKRVILADANLDKVLSAYNKHRDKPIREQAENIIHLFTLTNLGAPAAFKYFDTTIDRKRYTSTKEVLDATLIHQSITGLYETRIDLSQLGGDGGGGSGGGPAPGGTLQLDDEYRLYSPLVKPDQNIQFWLEQFPQAWAETAGMGLAKQVPPQVIQLKASATPVSVRQYPLSKEAQEGIRPHVQRLIQQGILVPVQSPWNTPLLPVRKPGTNDYRPVQDLREVNKRVQDIHPTVPNPYNLLCALPPQRSWYTVLDLKDAFFCLRLHPTSQPLFAFEWRDPGTGRTGQLTWTRLPQGFKNSPTIFDEALHRDLANFRIQHPQVTLLQYVDDLLLAGATKQDCLEGTKALLLELSDLGYRASAKKAQICRREVTYLGYSLRDGQRWLTEARKKTVVQIPAPTTAKQVREFLGTAGFCRLWIPGFATLAAPLYPLTKEKGEFSWAPEHQKAFDAIKKALLSAPALALPDVTKPFTLYVDERKGVARGVLTQTLGPWRRPVAYLSKKLDPVASGWPVCLKAIAAVAILVKDADKLTLGQNITVIAPHALENIVRQPPDRWMTNARMTHYQSLLLTERVTFAPPAALNPATLLPEETDEPVTHDCHQLLIEETGVRKDLTDIPLTGEVLTWFTDGSSYVVEGKRMAGAAVVDGTRTIWASSLPEGTSAQKAELMALTQALRLAEGKSINIYTDSRYAFATAHVHGAIYKQRGLLTSAGREIKNKEEILSLLEALHLPKRLAIIHCPGHQKAKDPISRGNQMADRVAKQAAQGVNLLAGKRTADGSEFEKRTADGSEFESPKKKAKVE

SEQ ID NO: 6983 - protein, 2085 aa, synthetic construct
MPAAKRVKLDGGDKKYSIGLDIGTNSVGWAVITDEYKVPSKKFKVLGNTDRHSIKKNLIGALLFDSGETAEATRLKRTARRRYTRRKNRICYLQEIFSNEMAKVDDSFFHRLEESFLVEEDKKHERHPIFGNIVDEVAYHEKYPTIYHLRKKLVDSTDKADLRLIYLALAHMIKFRGHFLIEGDLNPDNSDVDKLFIQLVQTYNQLFEENPINASGVDAKAILSARLSKSRRLENLIAQLPGEKKNGLFGNLIALSLGLTPNFKSNFDLAEDAKLQLSKDTYDDDLDNLLAQIGDQYADLFLAAKNLSDAILLSDILRVNTEITKAPLSASMIKRYDEHHQDLTLLKALVRQQLPEKYKEIFFDQSKNGYAGYIDGGASQEEFYKFIKPILEKMDGTEELLVKLNREDLLRKQRTFDNGSIPHQIHLGELHAILRRQEDFYPFLKDNREKIEKILTFRIPYYVGPLARGNSRFAWMTRKSEETITPWNFEEVVDKGASAQSFIERMTNFDKNLPNEKVLPKHSLLYEYFTVYNELTKVKYVTEGMRKPAFLSGEQKKAIVDLLFKTNRKVTVKQLKEDYFKKIECFDSVEISGVEDRFNASLGTYHDLLKIIKDKDFLDNEENEDILEDIVLTLTLFEDREMIEERLKTYAHLFDDKVMKQLKRRRYTGWGRLSRKLINGIRDKQSGKTILDFLKSDGFANRNFMQLIHDDSLTFKEDIQKAQVSGQGDSLHEHIANLAGSPAIKKGILQTVKVVDELVKVMGRHKPENIVIEMARENQTTQKGQKNSRERMKRIEEGIKELGSQILKEHPVENTQLQNEKLYLYYLQNGRDMYVDQELDINRLSDYDVDHIVPQSFLKDDSIDNKVLTRSDKARGKSDNVPSEEVVKKMKNYWRQLLNAKLITQRKFDNLTKAERGGLSELDKAGFIKRQLVETRQITKHVAQILDSRMNTKYDENDKLIREVKVITLKSKLVSDFRKDFQFYKVREINNYHHAHDAYLNAVVGTALIKKYPKLESEFVYGDYKVYDVRKMIAKSEQEIGKATAKYFFYSNIMNFFKTEITLANGEIRKRPLIETNGETGEIVWDKGRDFATVRKVLSMPQVNIVKKTEVQTGGFSKESILPKRNSDKLIARKKDWDPKKYGGFDSPTVAYSVLVVAKVEKGKSKKLKSVKELLGITIMERSSFEKNPIDFLEAKGYKEVKKDLIIKLPKYSLFELENGRKRMLASAGELQKGNELALPSKYVNFLYLASHYEKLKGSPEDNEQKQLFVEQHKHYLDEIIEQISEFSKRVILADANLDKVLSAYNKHRDKPIREQAENIIHLFTLTNLGAPAAFKYFDTTIDRKRYTSTKEVLDATLIHQSITGLYETRIDLSQLGGDGGGGSGGGPAPGGVPWLMKKPLQLTVLVPLHEYQERLLQQTALPKEQKELLQKLFLKYDALWQHWENQVGHRRIKPHNIATGTLAPRPQKQYPINPKAKPSIQIVIDDLLKQGVLIQQNSTMNTPVYPVPKPDGKWRMVLDYREVNKTIPLIAAQNQHSAGILSSIYRGKYKTTLDLTNGFWAHPITPESYWLTAFTWQGKQYCWTRLPQGFLNSPALFTADVVDLLKEIPNVQAYVDDIYISHDDPQEHLEQLEKIFSILLNAGYVVSLKKSEIAQREVEFLGFNITKEGRGLTDTFKQKLLNITPPKDLKQLQSILGLLNFARNFIPNYSELVKPLYTIVANANGKFISWTEDNSNQLQHIISVLNQADNLEERNPETRLIIKVNSSPSAGYIRYYNEGSKRPIMYVNYIFSKAEAKFTQTEKLLTTMHKGLIKAMDLAMGQEILVYSPIVSMTKIQRTPLPERKALPVRWITWMTYLEDPRIQFHYDKSLPELQQIPNVTEDVIAKTKHPSEFAMVFYTDGSAIKHPDVNKSHSAGMGIAQVQFIPEYKIVHQWSIPLGDHTAQLAEIAAVEFACKKALKISGPVLIVTDSFYVAESANKELPYWKSNGFLNNKKKPLRHVSKWKSIAECLQLKPDIIIMHEKGHQQPMTTLHTEGNNLADKLATQGSYVVHAGKRTADGSEFEKRTADGSEFESPKKKAKVE

SEQ ID NO: 6984 - protein, 2085 aa, synthetic construct
MPAAKRVKLDGGDKKYSIGLDIGTNSVGWAVITDEYKVPSKKFKVLGNTDRHSIKKNLIGALLFDSGETAEATRLKRTARRRYTRRKNRICYLQEIFSNEMAKVDDSFFHRLEESFLVEEDKKHERHPIFGNIVDEVAYHEKYPTIYHLRKKLVDSTDKADLRLIYLALAHMIKFRGHFLIEGDLNPDNSDVDKLFIQLVQTYNQLFEENPINASGVDAKAILSARLSKSRRLENLIAQLPGEKKNGLFGNLIALSLGLTPNFKSNFDLAEDAKLQLSKDTYDDDLDNLLAQIGDQYADLFLAAKNLSDAILLSDILRVNTEITKAPLSASMIKRYDEHHQDLTLLKALVRQQLPEKYKEIFFDQSKNGYAGYIDGGASQEEFYKFIKPILEKMDGTEELLVKLNREDLLRKQRTFDNGSIPHQIHLGELHAILRRQEDFYPFLKDNREKIEKILTFRIPYYVGPLARGNSRFAWMTRKSEETITPWNFEEVVDKGASAQSFIERMTNFDKNLPNEKVLPKHSLLYEYFTVYNELTKVKYVTEGMRKPAFLSGEQKKAIVDLLFKTNRKVTVKQLKEDYFKKIECFDSVEISGVEDRFNASLGTYHDLLKIIKDKDFLDNEENEDILEDIVLTLTLFEDREMIEERLKTYAHLFDDKVMKQLKRRRYTGWGRLSRKLINGIRDKQSGKTILDFLKSDGFANRNFMQLIHDDSLTFKEDIQKAQVSGQGDSLHEHIANLAGSPAIKKGILQTVKVVDELVKVMGRHKPENIVIEMARENQTTQKGQKNSRERMKRIEEGIKELGSQILKEHPVENTQLQNEKLYLYYLQNGRDMYVDQELDINRLSDYDVDHIVPQSFLKDDSIDNKVLTRSDKARGKSDNVPSEEVVKKMKNYWRQLLNAKLITQRKFDNLTKAERGGLSELDKAGFIKRQLVETRQITKHVAQILDSRMNTKYDENDKLIREVKVITLKSKLVSDFRKDFQFYKVREINNYHHAHDAYLNAVVGTALIKKYPKLESEFVYGDYKVYDVRKMIAKSEQEIGKATAKYFFYSNIMNFFKTEITLANGEIRKRPLIETNGETGEIVWDKGRDFATVRKVLSMPQVNIVKKTEVQTGGFSKESILPKRNSDKLIARKKDWDPKKYGGFDSPTVAYSVLVVAKVEKGKSKKLKSVKELLGITIMERSSFEKNPIDFLEAKGYKEVKKDLIIKLPKYSLFELENGRKRMLASAGELQKGNELALPSKYVNFLYLASHYEKLKGSPEDNEQKQLFVEQHKHYLDEIIEQISEFSKRVILADANLDKVLSAYNKHRDKPIREQAENIIHLFTLTNLGAPAAFKYFDTTIDRKRYTSTKEVLDATLIHQSITGLYETRIDLSQLGGDGGGGSGGGPAPGGIPWLMKKPLQLTTLVPLQEYEERLLKQTMLTGSYKEKLQSLFLKYDALWQHWENQVGHRRIKPHHIATGTVNPRPQKQYPINPKAKASIQTVINDLLKQGVLIQQNSIMNTPVYPVPKPDGKWRMVLDYREVNKTIPLIAAQNQHSAGILSSIFRGKYKTTLDLSNGFWAHSITPESYWLTAFTWLGQQYCWTRLPQGFLNSPALFNADVVDLLKEVPNVQVYVDDIYISHDDPREHLEQLEKVFSLLLNAGYVVSLKKSEIAQHEVEFLGFNITKEGRGLTETFKQKLLNITPPRDLKQLQSILGLLNFARNFIPNFSELVKPLYNIIATAPGKYITWTTDNSQQLQNIISMLNSAENLEERNPEVRLIMKVNTSPSAGYIRFYNEFAKRPIMYLNYVYTKAEVKFTNTEKLLTTIHKGLIKALDLGMGQEILVYSPIVSMTKIQKTPLPERKALPIRWITWMSYLEDPRIQFHYDKTLPELQQVPTVTDDIIAKIKHPSEFSMVFYTDGSAIKHPNVNKSHNAGMGIAQVQFKPEFTVINTWSIPLGDHTAQLAEVAAVEFACKKALKIDGPVLIVTDSFYVAESVNKELPYWQSNGFFNNKKKPLKHVSKWKSIADCIQLKPDIIIIHEKGHQPTASTFHTEGNNLADKLATQGSYVVNAGKRTADGSEFEKRTADGSEFESPKKKAKVE

SEQ ID NO: 6985 - protein, 2100 aa, synthetic construct
MPAAKRVKLDGGDKKYSIGLDIGTNSVGWAVITDEYKVPSKKFKVLGNTDRHSIKKNLIGALLFDSGETAEATRLKRTARRRYTRRKNRICYLQEIFSNEMAKVDDSFFHRLEESFLVEEDKKHERHPIFGNIVDEVAYHEKYPTIYHLRKKLVDSTDKADLRLIYLALAHMIKFRGHFLIEGDLNPDNSDVDKLFIQLVQTYNQLFEENPINASGVDAKAILSARLSKSRRLENLIAQLPGEKKNGLFGNLIALSLGLTPNFKSNFDLAEDAKLQLSKDTYDDDLDNLLAQIGDQYADLFLAAKNLSDAILLSDILRVNTEITKAPLSASMIKRYDEHHQDLTLLKALVRQQLPEKYKEIFFDQSKNGYAGYIDGGASQEEFYKFIKPILEKMDGTEELLVKLNREDLLRKQRTFDNGSIPHQIHLGELHAILRRQEDFYPFLKDNREKIEKILTFRIPYYVGPLARGNSRFAWMTRKSEETITPWNFEEVVDKGASAQSFIERMTNFDKNLPNEKVLPKHSLLYEYFTVYNELTKVKYVTEGMRKPAFLSGEQKKAIVDLLFKTNRKVTVKQLKEDYFKKIECFDSVEISGVEDRFNASLGTYHDLLKIIKDKDFLDNEENEDILEDIVLTLTLFEDREMIEERLKTYAHLFDDKVMKQLKRRRYTGWGRLSRKLINGIRDKQSGKTILDFLKSDGFANRNFMQLIHDDSLTFKEDIQKAQVSGQGDSLHEHIANLAGSPAIKKGILQTVKVVDELVKVMGRHKPENIVIEMARENQTTQKGQKNSRERMKRIEEGIKELGSQILKEHPVENTQLQNEKLYLYYLQNGRDMYVDQELDINRLSDYDVDHIVPQSFLKDDSIDNKVLTRSDKARGKSDNVPSEEVVKKMKNYWRQLLNAKLITQRKFDNLTKAERGGLSELDKAGFIKRQLVETRQITKHVAQILDSRMNTKYDENDKLIREVKVITLKSKLVSDFRKDFQFYKVREINNYHHAHDAYLNAVVGTALIKKYPKLESEFVYGDYKVYDVRKMIAKSEQEIGKATAKYFFYSNIMNFFKTEITLANGEIRKRPLIETNGETGEIVWDKGRDFATVRKVLSMPQVNIVKKTEVQTGGFSKESILPKRNSDKLIARKKDWDPKKYGGFDSPTVAYSVLVVAKVEKGKSKKLKSVKELLGITIMERSSFEKNPIDFLEAKGYKEVKKDLIIKLPKYSLFELENGRKRMLASAGELQKGNELALPSKYVNFLYLASHYEKLKGSPEDNEQKQLFVEQHKHYLDEIIEQISEFSKRVILADANLDKVLSAYNKHRDKPIREQAENIIHLFTLTNLGAPAAFKYFDTTIDRKRYTSTKEVLDATLIHQSITGLYETRIDLSQLGGDGGGGSPAPGGGGGTVSLQDEHRLFDIPVTTSLPDVWLQDFPQAWAETGGLGRAKCQAPIIIDLKPTAVPVSIKQYPMSLEAHMGIRQHIIKFLELGVLRPCRSPWNTPLLPVKKPGTQDYRPVQDLREINKRTVDIHPTVPNPYNLLSTLKPDYSWYTVLDLKDAFFCLPLAPQSQELFAFEWKDPERGISGQLTWTRLPQGFKNSPTLFNEALHRDLTDFRTQHPEVTLLQYVDDLLLAAPTKKACTQGTRHLLQELGEKGYRASAKKAQICQTKVTYLGYILSEGKRWLTPGRIETVARIPPPRNPREVREFLGTAGFCRLWIPGFAELAAPLYALTKPSTPFTWQTEHQLAFEALKKALLSAPALGLPDTSKPFTLFLDERQGIAKGVLTQKLGPWKRPVAYLSKKLDPVAAGWPPCLRIMAATAMLVKDSAKLTLGQPLTVITPHTLEAIVRQPPDRWITNARLTHYQALLLDTDRVQFGPPVTLNPATLLPVPENQPSPHDCRQVLAETHGTREDLKDQELPDADHTWYTDGSSYLDSGTRRAGAAVVDGHNTIWAQSLPPGTSAQKAELIALTKALELSKGKKANIYTDSRYAFATAHTHGSIYERRGWLTSEGKEIKNKAEIIALLKALFLPQEVAIIHCPGHQKGQDPVAVGNRQADRVARQAAMAEVLTLATEPDNTSHITAGKRTADGSEFEKRTADGSEFESPKKKAKVE

SEQ ID NO: 6986 - protein, 2092 aa, synthetic construct
MPAAKRVKLDGGDKKYSIGLDIGTNSVGWAVITDEYKVPSKKFKVLGNTDRHSIKKNLIGALLFDSGETAEATRLKRTARRRYTRRKNRICYLQEIFSNEMAKVDDSFFHRLEESFLVEEDKKHERHPIFGNIVDEVAYHEKYPTIYHLRKKLVDSTDKADLRLIYLALAHMIKFRGHFLIEGDLNPDNSDVDKLFIQLVQTYNQLFEENPINASGVDAKAILSARLSKSRRLENLIAQLPGEKKNGLFGNLIALSLGLTPNFKSNFDLAEDAKLQLSKDTYDDDLDNLLAQIGDQYADLFLAAKNLSDAILLSDILRVNTEITKAPLSASMIKRYDEHHQDLTLLKALVRQQLPEKYKEIFFDQSKNGYAGYIDGGASQEEFYKFIKPILEKMDGTEELLVKLNREDLLRKQRTFDNGSIPHQIHLGELHAILRRQEDFYPFLKDNREKIEKILTFRIPYYVGPLARGNSRFAWMTRKSEETITPWNFEEVVDKGASAQSFIERMTNFDKNLPNEKVLPKHSLLYEYFTVYNELTKVKYVTEGMRKPAFLSGEQKKAIVDLLFKTNRKVTVKQLKEDYFKKIECFDSVEISGVEDRFNASLGTYHDLLKIIKDKDFLDNEENEDILEDIVLTLTLFEDREMIEERLKTYAHLFDDKVMKQLKRRRYTGWGRLSRKLINGIRDKQSGKTILDFLKSDGFANRNFMQLIHDDSLTFKEDIQKAQVSGQGDSLHEHIANLAGSPAIKKGILQTVKVVDELVKVMGRHKPENIVIEMARENQTTQKGQKNSRERMKRIEEGIKELGSQILKEHPVENTQLQNEKLYLYYLQNGRDMYVDQELDINRLSDYDVDHIVPQSFLKDDSIDNKVLTRSDKARGKSDNVPSEEVVKKMKNYWRQLLNAKLITQRKFDNLTKAERGGLSELDKAGFIKRQLVETRQITKHVAQILDSRMNTKYDENDKLIREVKVITLKSKLVSDFRKDFQFYKVREINNYHHAHDAYLNAVVGTALIKKYPKLESEFVYGDYKVYDVRKMIAKSEQEIGKATAKYFFYSNIMNFFKTEITLANGEIRKRPLIETNGETGEIVWDKGRDFATVRKVLSMPQVNIVKKTEVQTGGFSKESILPKRNSDKLIARKKDWDPKKYGGFDSPTVAYSVLVVAKVEKGKSKKLKSVKELLGITIMERSSFEKNPIDFLEAKGYKEVKKDLIIKLPKYSLFELENGRKRMLASAGELQKGNELALPSKYVNFLYLASHYEKLKGSPEDNEQKQLFVEQHKHYLDEIIEQISEFSKRVILADANLDKVLSAYNKHRDKPIREQAENIIHLFTLTNLGAPAAFKYFDTTIDRKRYTSTKEVLDATLIHQSITGLYETRIDLSQLGGDGGGGSPAPGGGGGVLNLEEEYRLHEKPVPSSIDPSWLQLFPTVWAERAGMGLANQVPPVVVELRSGASPVAVRQYPMSKEAREGIRPHIQKFLDLGVLVPCRSPWNTPLLPVKKPGTNDYRPVQDLREINKRVQDIHPTVPNPYNLLSSLPPSYTWYSVLDLKDAFFCLRLHPNSQPLFAFEWKDPEKGNTGQLTWTRLPQGFKNSPTLFDEALHRDLAPFRALNPQVVLLQYVDDLLVAAPTYEDCKKGTQKLLQELSKLGYRVSAKKAQLCQREVTYLGYLLKEGKRWLTPARKATVMKIPVPTTPRQVREFLGTAGFCRLWIPGFASLAAPLYPLTKESIPFIWTEEHQQAFDHIKKALLSAPALALPDLTKPFTLYIDERAGVARGVLTQTLGPWRRPVAYLSKKLDPVASGWPTCLKAVAAVALLLKDADKLTLGQNVTVIASHSLESIVRQPPDRWMTNARMTHYQSLLLNERVSFAPPAVLNPATLLPVESEATPVHRCSEILAEETGTRRDLEDQPLPGVPTWYTDGSSFITEGKRRAGAPIVDGKRTVWASSLPEGTSAQKAELVALTQALRLAEGKNINIYTDSRYAFATAHIHGAIYKQRGLLTSAGKDIKNKEEILALLEAIHLPRRVAIIHCPGHQRGSNPVATGNRRADEAAKQAALSTRVLAGTTKPAGKRTADGSEFEKRTADGSEFESPKKKAKVE

SEQ ID NO: 6987 - protein, 2092 aa, synthetic construct
MPAAKRVKLDGGDKKYSIGLDIGTNSVGWAVITDEYKVPSKKFKVLGNTDRHSIKKNLIGALLFDSGETAEATRLKRTARRRYTRRKNRICYLQEIFSNEMAKVDDSFFHRLEESFLVEEDKKHERHPIFGNIVDEVAYHEKYPTIYHLRKKLVDSTDKADLRLIYLALAHMIKFRGHFLIEGDLNPDNSDVDKLFIQLVQTYNQLFEENPINASGVDAKAILSARLSKSRRLENLIAQLPGEKKNGLFGNLIALSLGLTPNFKSNFDLAEDAKLQLSKDTYDDDLDNLLAQIGDQYADLFLAAKNLSDAILLSDILRVNTEITKAPLSASMIKRYDEHHQDLTLLKALVRQQLPEKYKEIFFDQSKNGYAGYIDGGASQEEFYKFIKPILEKMDGTEELLVKLNREDLLRKQRTFDNGSIPHQIHLGELHAILRRQEDFYPFLKDNREKIEKILTFRIPYYVGPLARGNSRFAWMTRKSEETITPWNFEEVVDKGASAQSFIERMTNFDKNLPNEKVLPKHSLLYEYFTVYNELTKVKYVTEGMRKPAFLSGEQKKAIVDLLFKTNRKVTVKQLKEDYFKKIECFDSVEISGVEDRFNASLGTYHDLLKIIKDKDFLDNEENEDILEDIVLTLTLFEDREMIEERLKTYAHLFDDKVMKQLKRRRYTGWGRLSRKLINGIRDKQSGKTILDFLKSDGFANRNFMQLIHDDSLTFKEDIQKAQVSGQGDSLHEHIANLAGSPAIKKGILQTVKVVDELVKVMGRHKPENIVIEMARENQTTQKGQKNSRERMKRIEEGIKELGSQILKEHPVENTQLQNEKLYLYYLQNGRDMYVDQELDINRLSDYDVDHIVPQSFLKDDSIDNKVLTRSDKARGKSDNVPSEEVVKKMKNYWRQLLNAKLITQRKFDNLTKAERGGLSELDKAGFIKRQLVETRQITKHVAQILDSRMNTKYDENDKLIREVKVITLKSKLVSDFRKDFQFYKVREINNYHHAHDAYLNAVVGTALIKKYPKLESEFVYGDYKVYDVRKMIAKSEQEIGKATAKYFFYSNIMNFFKTEITLANGEIRKRPLIETNGETGEIVWDKGRDFATVRKVLSMPQVNIVKKTEVQTGGFSKESILPKRNSDKLIARKKDWDPKKYGGFDSPTVAYSVLVVAKVEKGKSKKLKSVKELLGITIMERSSFEKNPIDFLEAKGYKEVKKDLIIKLPKYSLFELENGRKRMLASAGELQKGNELALPSKYVNFLYLASHYEKLKGSPEDNEQKQLFVEQHKHYLDEIIEQISEFSKRVILADANLDKVLSAYNKHRDKPIREQAENIIHLFTLTNLGAPAAFKYFDTTIDRKRYTSTKEVLDATLIHQSITGLYETRIDLSQLGGDGGGGSPAPGGGGGVLNLEEEYRLHEKPVPSSIDPSWLQLFPTVWAERAGMGLANQVPPVVVELRSGASPVAVRQYPMSKEAREGIRPHIQKFLDLGVLVPCRSPWNTPLLPVKKPGTNDYRPVQDLREINKRVQDIHPTVPNPYNLLSSLPPSYTWYSVLDLKDAFFCLRLHPNSQPLFAFEWKDPEKGNTGQLTWTRLPQGFKNSPTLFNEALHRDLAPFRALNPQVVLLQYVDDLLVAAPTYEDCKKGTQKLLQELSKLGYRVSAKKAQLCQREVTYLGYLLKEGKRWLTPARKATVMKIPVPTTPRQVREFLGTAGFCRLWIPGFASLAAPLYPLTKPSIPFIWTEEHQQAFDHIKKALLSAPALALPDLTKPFTLYIDERAGVARGVLTQTLGPWRRPVAYLSKKLDPVASGWPTCLKAVAAVALLLKDADKLTLGQNVTVIASHSLESIVRQPPDRWMTNARMTHYQSLLLNERVSFAPPAVLNPATLLPVESEATPVHRCSEILAEETGTRRDLEDQPLPGVPTWYTDGSSFITEGKRRAGAPIVDGKRTVWASSLPEGTSAQKAELVALTQALRLAEGKNINIYTDSRYAFATAHIHGAIYKQRGWLTSAGKDIKNKEEILALLEAIHLPRRVAIIHCPGHQRGSNPVATGNRRADEAAKQAALSTRVLAGTTKPAGKRTADGSEFEKRTADGSEFESPKKKAKVE

SEQ ID NO: 6988 - protein, 2125 aa, synthetic construct
MPAAKRVKLDGGDKKYSIGLDIGTNSVGWAVITDEYKVPSKKFKVLGNTDRHSIKKNLIGALLFDSGETAEATRLKRTARRRYTRRKNRICYLQEIFSNEMAKVDDSFFHRLEESFLVEEDKKHERHPIFGNIVDEVAYHEKYPTIYHLRKKLVDSTDKADLRLIYLALAHMIKFRGHFLIEGDLNPDNSDVDKLFIQLVQTYNQLFEENPINASGVDAKAILSARLSKSRRLENLIAQLPGEKKNGLFGNLIALSLGLTPNFKSNFDLAEDAKLQLSKDTYDDDLDNLLAQIGDQYADLFLAAKNLSDAILLSDILRVNTEITKAPLSASMIKRYDEHHQDLTLLKALVRQQLPEKYKEIFFDQSKNGYAGYIDGGASQEEFYKFIKPILEKMDGTEELLVKLNREDLLRKQRTFDNGSIPHQIHLGELHAILRRQEDFYPFLKDNREKIEKILTFRIPYYVGPLARGNSRFAWMTRKSEETITPWNFEEVVDKGASAQSFIERMTNFDKNLPNEKVLPKHSLLYEYFTVYNELTKVKYVTEGMRKPAFLSGEQKKAIVDLLFKTNRKVTVKQLKEDYFKKIECFDSVEISGVEDRFNASLGTYHDLLKIIKDKDFLDNEENEDILEDIVLTLTLFEDREMIEERLKTYAHLFDDKVMKQLKRRRYTGWGRLSRKLINGIRDKQSGKTILDFLKSDGFANRNFMQLIHDDSLTFKEDIQKAQVSGQGDSLHEHIANLAGSPAIKKGILQTVKVVDELVKVMGRHKPENIVIEMARENQTTQKGQKNSRERMKRIEEGIKELGSQILKEHPVENTQLQNEKLYLYYLQNGRDMYVDQELDINRLSDYDVDHIVPQSFLKDDSIDNKVLTRSDKARGKSDNVPSEEVVKKMKNYWRQLLNAKLITQRKFDNLTKAERGGLSELDKAGFIKRQLVETRQITKHVAQILDSRMNTKYDENDKLIREVKVITLKSKLVSDFRKDFQFYKVREINNYHHAHDAYLNAVVGTALIKKYPKLESEFVYGDYKVYDVRKMIAKSEQEIGKATAKYFFYSNIMNFFKTEITLANGEIRKRPLIETNGETGEIVWDKGRDFATVRKVLSMPQVNIVKKTEVQTGGFSKESILPKRNSDKLIARKKDWDPKKYGGFDSPTVAYSVLVVAKVEKGKSKKLKSVKELLGITIMERSSFEKNPIDFLEAKGYKEVKKDLIIKLPKYSLFELENGRKRMLASAGELQKGNELALPSKYVNFLYLASHYEKLKGSPEDNEQKQLFVEQHKHYLDEIIEQISEFSKRVILADANLDKVLSAYNKHRDKPIREQAENIIHLFTLTNLGAPAAFKYFDTTIDRKRYTSTKEVLDATLIHQSITGLYETRIDLSQLGGDGGGGSPAPGGGGGLLGRDLLTKLKAQIQFSTEGPQVTWEDRPAMCLVLNLEEEYRLHEKPVPPSIDPSWLQLFPMVWAEKAGMGLANQVPPVVVELKSDASPVAVRQYPMSKEAREGIRPHIQRFLDLGILVPCQSPWNTPLLPVKKPGTNDYRPVQDLREVNKRVQDIHPTVPNPYNLLSSLPPSHTWYSVLDLKDAFFCLKLHPNSQPLFAFEWRDPEKGNTGQLTWTRLPQGFKNSPTLFNEALHRDLASFRALNPQVVMLQYVDDLLVAAPTYRDCKEGTRRLLQELSKLGYRVSAKKAQLCREEVTYLGYLLKGGKRWLTPARKATVMKIPTPTTPRQVREFLGTAGFCRLWIPGFASLAAPLYPLTRPKVPFTWTEAHQEAFGRIKEALLSAPALALPDLTKPFALYVDEKEGVARGVLTQTLGPWRRPVAYLSKKLDPVASGWPTCLKAIAAVALLLKDADKLTLGQNVLVIAPHNLESIVRQPPDRWMTNARMTHYQSLLLNERVSFAPPAILNPATLLPVESDDTPIHICSEILAEETGTRPDLRDQPLPGVPAWYTDGSSFIMDGRRQAGAAIVDNKRTVWASNLPEGTSAQKAELIALTQALRLAEGKSINIYTDSRYAFATAHVHGAIYKQRGWLTSAGKDIKNKEEILALLEAIHLPKRVAIIHCPGHQRGTDPVATGNRKADEAAKQAAQSTRILTETTKNAGKRTADGSEFEKRTADGSEFESPKKKAKVE

SEQ ID NO: 6989 - protein, 2216 aa, synthetic construct
MPAAKRVKLDGGDKKYSIGLDIGTNSVGWAVITDEYKVPSKKFKVLGNTDRHSIKKNLIGALLFDSGETAEATRLKRTARRRYTRRKNRICYLQEIFSNEMAKVDDSFFHRLEESFLVEEDKKHERHPIFGNIVDEVAYHEKYPTIYHLRKKLVDSTDKADLRLIYLALAHMIKFRGHFLIEGDLNPDNSDVDKLFIQLVQTYNQLFEENPINASGVDAKAILSARLSKSRRLENLIAQLPGEKKNGLFGNLIALSLGLTPNFKSNFDLAEDAKLQLSKDTYDDDLDNLLAQIGDQYADLFLAAKNLSDAILLSDILRVNTEITKAPLSASMIKRYDEHHQDLTLLKALVRQQLPEKYKEIFFDQSKNGYAGYIDGGASQEEFYKFIKPILEKMDGTEELLVKLNREDLLRKQRTFDNGSIPHQIHLGELHAILRRQEDFYPFLKDNREKIEKILTFRIPYYVGPLARGNSRFAWMTRKSEETITPWNFEEVVDKGASAQSFIERMTNFDKNLPNEKVLPKHSLLYEYFTVYNELTKVKYVTEGMRKPAFLSGEQKKAIVDLLFKTNRKVTVKQLKEDYFKKIECFDSVEISGVEDRFNASLGTYHDLLKIIKDKDFLDNEENEDILEDIVLTLTLFEDREMIEERLKTYAHLFDDKVMKQLKRRRYTGWGRLSRKLINGIRDKQSGKTILDFLKSDGFANRNFMQLIHDDSLTFKEDIQKAQVSGQGDSLHEHIANLAGSPAIKKGILQTVKVVDELVKVMGRHKPENIVIEMARENQTTQKGQKNSRERMKRIEEGIKELGSQILKEHPVENTQLQNEKLYLYYLQNGRDMYVDQELDINRLSDYDVDHIVPQSFLKDDSIDNKVLTRSDKARGKSDNVPSEEVVKKMKNYWRQLLNAKLITQRKFDNLTKAERGGLSELDKAGFIKRQLVETRQITKHVAQILDSRMNTKYDENDKLIREVKVITLKSKLVSDFRKDFQFYKVREINNYHHAHDAYLNAVVGTALIKKYPKLESEFVYGDYKVYDVRKMIAKSEQEIGKATAKYFFYSNIMNFFKTEITLANGEIRKRPLIETNGETGEIVWDKGRDFATVRKVLSMPQVNIVKKTEVQTGGFSKESILPKRNSDKLIARKKDWDPKKYGGFDSPTVAYSVLVVAKVEKGKSKKLKSVKELLGITIMERSSFEKNPIDFLEAKGYKEVKKDLIIKLPKYSLFELENGRKRMLASAGELQKGNELALPSKYVNFLYLASHYEKLKGSPEDNEQKQLFVEQHKHYLDEIIEQISEFSKRVILADANLDKVLSAYNKHRDKPIREQAENIIHLFTLTNLGAPAAFKYFDTTIDRKRYTSTKEVLDATLIHQSITGLYETRIDLSQLGGDGGGGSPAPGGGGGTLGDQGSRGSDPLPEPRVTLTVEGIPTEFLVNTGAEHSVLTKPMGKMGSKRTVVAGATGSKVYPWTTKRLLKIGQKQVTHSFLVIPECPAPLLGRDLLTKLKAQIQFSTEGPQVTWEDRPAMCLVLNLEEEYRLHEKPVPPSIDPSWLQLFPMVWAEKAGMGLANQVPPVVVELKSDASPVAVRQYPMSKEAREGIRPHIQRFLDLGILVPCQSPWNTPLLPVKKPGTNDYRPVQDLREVNKRVQDIHPTVPNPYNLLSSLPPSHTWYSVLDLKDAFFCLKLHPNSQPLFAFEWRDPEKGNTGQLTWTRLPQGFKNSPTLFNEALHRDLASFRALNPQVVMLQYVDDLLVAAPTYRDCKEGTRRLLQELSKLGYRVSAKKAQLCREEVTYLGYLLKGGKRWLTPARKATVMKIPTPTTPRQVREFLGTAGFCRLWIPGFASLAAPLYPLTRPKVPFTWTEAHQEAFGRIKEALLSAPALALPDLTKPFALYVDEKEGVARGVLTQTLGPWRRPVAYLSKKLDPVASGWPTCLKAIAAVALLLKDADKLTLGQNVLVIAPHNLESIVRQPPDRWMTNARMTHYQSLLLNERVSFAPPAILNPATLLPVESDDTPIHICSEILAEETGTRPDLRDQPLPGVPAWYTDGSSFIMDGRRQAGAAIVDNKRTVWASNLPEGTSAQKAELIALTQALRLAEGKSINIYTDSRYAFATAHVHGAIYKQRGWLTSAGKDIKNKEEILALLEAIHLPKRVAIIHCPGHQRGTDPVATGNRKADEAAKQAAQSTRILTETTKNAGKRTADGSEFEKRTADGSEFESPKKKAKVE

SEQ ID NO: 6990 - protein, 2088 aa, synthetic construct
MPAAKRVKLDGGDKKYSIGLDIGTNSVGWAVITDEYKVPSKKFKVLGNTDRHSIKKNLIGALLFDSGETAEATRLKRTARRRYTRRKNRICYLQEIFSNEMAKVDDSFFHRLEESFLVEEDKKHERHPIFGNIVDEVAYHEKYPTIYHLRKKLVDSTDKADLRLIYLALAHMIKFRGHFLIEGDLNPDNSDVDKLFIQLVQTYNQLFEENPINASGVDAKAILSARLSKSRRLENLIAQLPGEKKNGLFGNLIALSLGLTPNFKSNFDLAEDAKLQLSKDTYDDDLDNLLAQIGDQYADLFLAAKNLSDAILLSDILRVNTEITKAPLSASMIKRYDEHHQDLTLLKALVRQQLPEKYKEIFFDQSKNGYAGYIDGGASQEEFYKFIKPILEKMDGTEELLVKLNREDLLRKQRTFDNGSIPHQIHLGELHAILRRQEDFYPFLKDNREKIEKILTFRIPYYVGPLARGNSRFAWMTRKSEETITPWNFEEVVDKGASAQSFIERMTNFDKNLPNEKVLPKHSLLYEYFTVYNELTKVKYVTEGMRKPAFLSGEQKKAIVDLLFKTNRKVTVKQLKEDYFKKIECFDSVEISGVEDRFNASLGTYHDLLKIIKDKDFLDNEENEDILEDIVLTLTLFEDREMIEERLKTYAHLFDDKVMKQLKRRRYTGWGRLSRKLINGIRDKQSGKTILDFLKSDGFANRNFMQLIHDDSLTFKEDIQKAQVSGQGDSLHEHIANLAGSPAIKKGILQTVKVVDELVKVMGRHKPENIVIEMARENQTTQKGQKNSRERMKRIEEGIKELGSQILKEHPVENTQLQNEKLYLYYLQNGRDMYVDQELDINRLSDYDVDHIVPQSFLKDDSIDNKVLTRSDKARGKSDNVPSEEVVKKMKNYWRQLLNAKLITQRKFDNLTKAERGGLSELDKAGFIKRQLVETRQITKHVAQILDSRMNTKYDENDKLIREVKVITLKSKLVSDFRKDFQFYKVREINNYHHAHDAYLNAVVGTALIKKYPKLESEFVYGDYKVYDVRKMIAKSEQEIGKATAKYFFYSNIMNFFKTEITLANGEIRKRPLIETNGETGEIVWDKGRDFATVRKVLSMPQVNIVKKTEVQTGGFSKESILPKRNSDKLIARKKDWDPKKYGGFDSPTVAYSVLVVAKVEKGKSKKLKSVKELLGITIMERSSFEKNPIDFLEAKGYKEVKKDLIIKLPKYSLFELENGRKRMLASAGELQKGNELALPSKYVNFLYLASHYEKLKGSPEDNEQKQLFVEQHKHYLDEIIEQISEFSKRVILADANLDKVLSAYNKHRDKPIREQAENIIHLFTLTNLGAPAAFKYFDTTIDRKRYTSTKEVLDATLIHQSITGLYETRIDLSQLGGDGGGGSPAPGGGGGTLQLDDEYRLYSPLVKPDQNIQFWLEQFPQAWAETAGMGLAKQVPPQVIQLKASATPVSVRQYPLSKEAQEGIRPHVQRLIQQGILVPVQSPWNTPLLPVRKPGTNDYRPVQDLREVNKRVQDIHPTVPNPYNLLCALPPQRSWYTVLDLKDAFFCLRLHPTSQPLFAFEWRDPGTGRTGQLTWTRLPQGFKNSPTIFDEALHRDLANFRIQHPQVTLLQYVDDLLLAGATKQDCLEGTKALLLELSDLGYRASAKKAQICRREVTYLGYSLRDGQRWLTEARKKTVVQIPAPTTAKQVREFLGTAGFCRLWIPGFATLAAPLYPLTKEKGEFSWAPEHQKAFDAIKKALLSAPALALPDVTKPFTLYVDERKGVARGVLTQTLGPWRRPVAYLSKKLDPVASGWPVCLKAIAAVAILVKDADKLTLGQNITVIAPHALENIVRQPPDRWMTNARMTHYQSLLLTERVTFAPPAALNPATLLPEETDEPVTHDCHQLLIEETGVRKDLTDIPLTGEVLTWFTDGSSYVVEGKRMAGAAVVDGTRTIWASSLPEGTSAQKAELMALTQALRLAEGKSINIYTDSRYAFATAHVHGAIYKQRGLLTSAGREIKNKEEILSLLEALHLPKRLAIIHCPGHQKAKDPISRGNQMADRVAKQAAQGVNLLAGKRTADGSEFEKRTADGSEFESPKKKAKVE

SEQ ID NO: 6991 - protein, 2174 aa, synthetic construct
MPAAKRVKLDGGDKKYSIGLDIGTNSVGWAVITDEYKVPSKKFKVLGNTDRHSIKKNLIGALLFDSGETAEATRLKRTARRRYTRRKNRICYLQEIFSNEMAKVDDSFFHRLEESFLVEEDKKHERHPIFGNIVDEVAYHEKYPTIYHLRKKLVDSTDKADLRLIYLALAHMIKFRGHFLIEGDLNPDNSDVDKLFIQLVQTYNQLFEENPINASGVDAKAILSARLSKSRRLENLIAQLPGEKKNGLFGNLIALSLGLTPNFKSNFDLAEDAKLQLSKDTYDDDLDNLLAQIGDQYADLFLAAKNLSDAILLSDILRVNTEITKAPLSASMIKRYDEHHQDLTLLKALVRQQLPEKYKEIFFDQSKNGYAGYIDGGASQEEFYKFIKPILEKMDGTEELLVKLNREDLLRKQRTFDNGSIPHQIHLGELHAILRRQEDFYPFLKDNREKIEKILTFRIPYYVGPLARGNSRFAWMTRKSEETITPWNFEEVVDKGASAQSFIERMTNFDKNLPNEKVLPKHSLLYEYFTVYNELTKVKYVTEGMRKPAFLSGEQKKAIVDLLFKTNRKVTVKQLKEDYFKKIECFDSVEISGVEDRFNASLGTYHDLLKIIKDKDFLDNEENEDILEDIVLTLTLFEDREMIEERLKTYAHLFDDKVMKQLKRRRYTGWGRLSRKLINGIRDKQSGKTILDFLKSDGFANRNFMQLIHDDSLTFKEDIQKAQVSGQGDSLHEHIANLAGSPAIKKGILQTVKVVDELVKVMGRHKPENIVIEMARENQTTQKGQKNSRERMKRIEEGIKELGSQILKEHPVENTQLQNEKLYLYYLQNGRDMYVDQELDINRLSDYDVDHIVPQSFLKDDSIDNKVLTRSDKARGKSDNVPSEEVVKKMKNYWRQLLNAKLITQRKFDNLTKAERGGLSELDKAGFIKRQLVETRQITKHVAQILDSRMNTKYDENDKLIREVKVITLKSKLVSDFRKDFQFYKVREINNYHHAHDAYLNAVVGTALIKKYPKLESEFVYGDYKVYDVRKMIAKSEQEIGKATAKYFFYSNIMNFFKTEITLANGEIRKRPLIETNGETGEIVWDKGRDFATVRKVLSMPQVNIVKKTEVQTGGFSKESILPKRNSDKLIARKKDWDPKKYGGFDSPTVAYSVLVVAKVEKGKSKKLKSVKELLGITIMERSSFEKNPIDFLEAKGYKEVKKDLIIKLPKYSLFELENGRKRMLASAGELQKGNELALPSKYVNFLYLASHYEKLKGSPEDNEQKQLFVEQHKHYLDEIIEQISEFSKRVILADANLDKVLSAYNKHRDKPIREQAENIIHLFTLTNLGAPAAFKYFDTTIDRKRYTSTKEVLDATLIHQSITGLYETRIDLSQLGGDGGGGSPAPGGGGGMDPLQLLQPLEAEIKGTKLKAHWNSGATITCVPEAFLEDERPIQTMLIKTIHGEKQQDVYYLTFKVQGRKVEAEVLASPYDYILLNPSDVPWLMKKPLQLTVLVPLHEYQERLLQQTALPKEQKELLQKLFLKYDALWQHWENQVGHRRIKPHNIATGTLAPRPQKQYPINPKAKPSIQIVIDDLLKQGVLIQQNSTMNTPVYPVPKPDGKWRMVLDYREVNKTIPLIAAQNQHSAGILSSIYRGKYKTTLDLTNGFWAHPITPESYWLTAFTWQGKQYCWTRLPQGFLNSPALFNADVVDLLKEIPNVQAYVDDIYISHDDPQEHLEQLEKIFSILLNAGYVVSLKKSEIAQREVEFLGFNITKEGRGLTDTFKQKLLNITPPKDLKQLQSILGLLNFARNFIPNYSELVKPLYTIVAPANGKFISWTEDNSNQLQHIISVLNQADNLEERNPETRLIIKVNSSPSAGYIRYYNEGSKRPIMYVNYIFSKAEAKFTQTEKLLTTMHKGLIKAMDLAMGQEILVYSPIVSMTKIQRTPLPERKALPVRWITWMTYLEDPRIQFHYDKSLPELQQIPNVTEDVIAKTKHPSEFAMVFYTDGSAIKHPDVNKSHSAGMGIAQVQFIPEYKIVHQWSIPLGDHTAQLAEIAAVEFACKKALKISGPVLIVTDSFYVAESANKELPYWKSNGFLNNKKKPLRHVSKWKSIAECLQLKPDIIIMHEKGHQQPMTTLHTEGNNLADKLATQGSYVVHAGKRTADGSEFEKRTADGSEFESPKKKAKVE

SEQ ID NO: 6992 - protein, 2092 aa, synthetic construct
MPAAKRVKLDGGDKKYSIGLDIGTNSVGWAVITDEYKVPSKKFKVLGNTDRHSIKKNLIGALLFDSGETAEATRLKRTARRRYTRRKNRICYLQEIFSNEMAKVDDSFFHRLEESFLVEEDKKHERHPIFGNIVDEVAYHEKYPTIYHLRKKLVDSTDKADLRLIYLALAHMIKFRGHFLIEGDLNPDNSDVDKLFIQLVQTYNQLFEENPINASGVDAKAILSARLSKSRRLENLIAQLPGEKKNGLFGNLIALSLGLTPNFKSNFDLAEDAKLQLSKDTYDDDLDNLLAQIGDQYADLFLAAKNLSDAILLSDILRVNTEITKAPLSASMIKRYDEHHQDLTLLKALVRQQLPEKYKEIFFDQSKNGYAGYIDGGASQEEFYKFIKPILEKMDGTEELLVKLNREDLLRKQRTFDNGSIPHQIHLGELHAILRRQEDFYPFLKDNREKIEKILTFRIPYYVGPLARGNSRFAWMTRKSEETITPWNFEEVVDKGASAQSFIERMTNFDKNLPNEKVLPKHSLLYEYFTVYNELTKVKYVTEGMRKPAFLSGEQKKAIVDLLFKTNRKVTVKQLKEDYFKKIECFDSVEISGVEDRFNASLGTYHDLLKIIKDKDFLDNEENEDILEDIVLTLTLFEDREMIEERLKTYAHLFDDKVMKQLKRRRYTGWGRLSRKLINGIRDKQSGKTILDFLKSDGFANRNFMQLIHDDSLTFKEDIQKAQVSGQGDSLHEHIANLAGSPAIKKGILQTVKVVDELVKVMGRHKPENIVIEMARENQTTQKGQKNSRERMKRIEEGIKELGSQILKEHPVENTQLQNEKLYLYYLQNGRDMYVDQELDINRLSDYDVDHIVPQSFLKDDSIDNKVLTRSDKARGKSDNVPSEEVVKKMKNYWRQLLNAKLITQRKFDNLTKAERGGLSELDKAGFIKRQLVETRQITKHVAQILDSRMNTKYDENDKLIREVKVITLKSKLVSDFRKDFQFYKVREINNYHHAHDAYLNAVVGTALIKKYPKLESEFVYGDYKVYDVRKMIAKSEQEIGKATAKYFFYSNIMNFFKTEITLANGEIRKRPLIETNGETGEIVWDKGRDFATVRKVLSMPQVNIVKKTEVQTGGFSKESILPKRNSDKLIARKKDWDPKKYGGFDSPTVAYSVLVVAKVEKGKSKKLKSVKELLGITIMERSSFEKNPIDFLEAKGYKEVKKDLIIKLPKYSLFELENGRKRMLASAGELQKGNELALPSKYVNFLYLASHYEKLKGSPEDNEQKQLFVEQHKHYLDEIIEQISEFSKRVILADANLDKVLSAYNKHRDKPIREQAENIIHLFTLTNLGAPAAFKYFDTTIDRKRYTSTKEVLDATLIHQSITGLYETRIDLSQLGGDGGGGSPAPGGGGGVLNLEEEYRLHEKPVPSSIDPSWLQLFPTVWAERAGMGLANQVPPVVVELRSGASPVAVRQYPMSKEAREGIRPHIQRFLDLGVLVPCQSPWNTPLLPVKKPGTNDYRPVQDLREINKRVQDIHPTVPNPYNLLSSLPPSHTWYSVLDLKDAFFCLKLHPNSQPLFAFEWRDPEKGNTGQLTWTRLPQGFKNSPTLFDEALHRDLAPFRALNPQVVLLQYVDDLLVAAPTYRDCKEGTQKLLQELSKLGYRVSAKKAQLCQKEVTYLGYLLKEGKRWLTPARKATVMKIPPPTTPRQVREFLGTAGFCRLWIPGFASLAAPLYPLTKESIPFIWTEEHQKAFDRIKEALLSAPALALPDLTKPFTLYVDERAGVARGVLTQTLGPWRRPVAYLSKKLDPVASGWPTCLKAVAAVALLLKDADKLTLGQNVTVIASHSLESIVRQPPDRWMTNARMTHYQSLLLNERVSFAPPAVLNPATLLPVESEATPVHRCSEILAEETGTRRDLKDQPLPGVPAWYTDGSSFIAEGKRRAGAAIVDGKRTVWASSLPEGTSAQKAELVALTQALRLAEGKDINIYTDSRYAFATAHIHGAIYKQRGLLTSAGKDIKNKEEILALLEAIHLPKRVAIIHCPGHQKGNDPVATGNRRADEAAKQAALSTRVLAETTKPAGKRTADGSEFEKRTADGSEFESPKKKAKVE

SEQ ID NO: 6993 - protein, 2100 aa, synthetic construct
MPAAKRVKLDGGDKKYSIGLDIGTNSVGWAVITDEYKVPSKKFKVLGNTDRHSIKKNLIGALLFDSGETAEATRLKRTARRRYTRRKNRICYLQEIFSNEMAKVDDSFFHRLEESFLVEEDKKHERHPIFGNIVDEVAYHEKYPTIYHLRKKLVDSTDKADLRLIYLALAHMIKFRGHFLIEGDLNPDNSDVDKLFIQLVQTYNQLFEENPINASGVDAKAILSARLSKSRRLENLIAQLPGEKKNGLFGNLIALSLGLTPNFKSNFDLAEDAKLQLSKDTYDDDLDNLLAQIGDQYADLFLAAKNLSDAILLSDILRVNTEITKAPLSASMIKRYDEHHQDLTLLKALVRQQLPEKYKEIFFDQSKNGYAGYIDGGASQEEFYKFIKPILEKMDGTEELLVKLNREDLLRKQRTFDNGSIPHQIHLGELHAILRRQEDFYPFLKDNREKIEKILTFRIPYYVGPLARGNSRFAWMTRKSEETITPWNFEEVVDKGASAQSFIERMTNFDKNLPNEKVLPKHSLLYEYFTVYNELTKVKYVTEGMRKPAFLSGEQKKAIVDLLFKTNRKVTVKQLKEDYFKKIECFDSVEISGVEDRFNASLGTYHDLLKIIKDKDFLDNEENEDILEDIVLTLTLFEDREMIEERLKTYAHLFDDKVMKQLKRRRYTGWGRLSRKLINGIRDKQSGKTILDFLKSDGFANRNFMQLIHDDSLTFKEDIQKAQVSGQGDSLHEHIANLAGSPAIKKGILQTVKVVDELVKVMGRHKPENIVIEMARENQTTQKGQKNSRERMKRIEEGIKELGSQILKEHPVENTQLQNEKLYLYYLQNGRDMYVDQELDINRLSDYDVDHIVPQSFLKDDSIDNKVLTRSDKARGKSDNVPSEEVVKKMKNYWRQLLNAKLITQRKFDNLTKAERGGLSELDKAGFIKRQLVETRQITKHVAQILDSRMNTKYDENDKLIREVKVITLKSKLVSDFRKDFQFYKVREINNYHHAHDAYLNAVVGTALIKKYPKLESEFVYGDYKVYDVRKMIAKSEQEIGKATAKYFFYSNIMNFFKTEITLANGEIRKRPLIETNGETGEIVWDKGRDFATVRKVLSMPQVNIVKKTEVQTGGFSKESILPKRNSDKLIARKKDWDPKKYGGFDSPTVAYSVLVVAKVEKGKSKKLKSVKELLGITIMERSSFEKNPIDFLEAKGYKEVKKDLIIKLPKYSLFELENGRKRMLASAGELQKGNELALPSKYVNFLYLASHYEKLKGSPEDNEQKQLFVEQHKHYLDEIIEQISEFSKRVILADANLDKVLSAYNKHRDKPIREQAENIIHLFTLTNLGAPAAFKYFDTTIDRKRYTSTKEVLDATLIHQSITGLYETRIDLSQLGGDGGGGGGGSPAPGGTVSLQDEHRLFDIPVTTSLPDVWLQDFPQAWAETGGLGRAKCQAPIIIDLKPTAVPVSIKQYPMSLEAHMGIRQHIIKFLELGVLRPCRSPWNTPLLPVKKPGTQDYRPVQDLREINKRTVDIHPTVPNPYNLLSTLKPDYSWYTVLDLKDAFFCLPLAPQSQELFAFEWKDPERGISGQLTWTRLPQGFKNSPTLFNEALHRDLTDFRTQHPEVTLLQYVDDLLLAAPTKKACTQGTRHLLQELGEKGYRASAKKAQICQTKVTYLGYILSEGKRWLTPGRIETVARIPPPRNPREVREFLGTAGFCRLWIPGFAELAAPLYALTKPSTPFTWQTEHQLAFEALKKALLSAPALGLPDTSKPFTLFLDERQGIAKGVLTQKLGPWKRPVAYLSKKLDPVAAGWPPCLRIMAATAMLVKDSAKLTLGQPLTVITPHTLEAIVRQPPDRWITNARLTHYQALLLDTDRVQFGPPVTLNPATLLPVPENQPSPHDCRQVLAETHGTREDLKDQELPDADHTWYTDGSSYLDSGTRRAGAAVVDGHNTIWAQSLPPGTSAQKAELIALTKALELSKGKKANIYTDSRYAFATAHTHGSIYERRGWLTSEGKEIKNKAEIIALLKALFLPQEVAIIHCPGHQKGQDPVAVGNRQADRVARQAAMAEVLTLATEPDNTSHITAGKRTADGSEFEKRTADGSEFESPKKKAKVE

SEQ ID NO: 6994 - protein, 2171 aa, synthetic construct
MPAAKRVKLDGGDKKYSIGLDIGTNSVGWAVITDEYKVPSKKFKVLGNTDRHSIKKNLIGALLFDSGETAEATRLKRTARRRYTRRKNRICYLQEIFSNEMAKVDDSFFHRLEESFLVEEDKKHERHPIFGNIVDEVAYHEKYPTIYHLRKKLVDSTDKADLRLIYLALAHMIKFRGHFLIEGDLNPDNSDVDKLFIQLVQTYNQLFEENPINASGVDAKAILSARLSKSRRLENLIAQLPGEKKNGLFGNLIALSLGLTPNFKSNFDLAEDAKLQLSKDTYDDDLDNLLAQIGDQYADLFLAAKNLSDAILLSDILRVNTEITKAPLSASMIKRYDEHHQDLTLLKALVRQQLPEKYKEIFFDQSKNGYAGYIDGGASQEEFYKFIKPILEKMDGTEELLVKLNREDLLRKQRTFDNGSIPHQIHLGELHAILRRQEDFYPFLKDNREKIEKILTFRIPYYVGPLARGNSRFAWMTRKSEETITPWNFEEVVDKGASAQSFIERMTNFDKNLPNEKVLPKHSLLYEYFTVYNELTKVKYVTEGMRKPAFLSGEQKKAIVDLLFKTNRKVTVKQLKEDYFKKIECFDSVEISGVEDRFNASLGTYHDLLKIIKDKDFLDNEENEDILEDIVLTLTLFEDREMIEERLKTYAHLFDDKVMKQLKRRRYTGWGRLSRKLINGIRDKQSGKTILDFLKSDGFANRNFMQLIHDDSLTFKEDIQKAQVSGQGDSLHEHIANLAGSPAIKKGILQTVKVVDELVKVMGRHKPENIVIEMARENQTTQKGQKNSRERMKRIEEGIKELGSQILKEHPVENTQLQNEKLYLYYLQNGRDMYVDQELDINRLSDYDVDHIVPQSFLKDDSIDNKVLTRSDKARGKSDNVPSEEVVKKMKNYWRQLLNAKLITQRKFDNLTKAERGGLSELDKAGFIKRQLVETRQITKHVAQILDSRMNTKYDENDKLIREVKVITLKSKLVSDFRKDFQFYKVREINNYHHAHDAYLNAVVGTALIKKYPKLESEFVYGDYKVYDVRKMIAKSEQEIGKATAKYFFYSNIMNFFKTEITLANGEIRKRPLIETNGETGEIVWDKGRDFATVRKVLSMPQVNIVKKTEVQTGGFSKESILPKRNSDKLIARKKDWDPKKYGGFDSPTVAYSVLVVAKVEKGKSKKLKSVKELLGITIMERSSFEKNPIDFLEAKGYKEVKKDLIIKLPKYSLFELENGRKRMLASAGELQKGNELALPSKYVNFLYLASHYEKLKGSPEDNEQKQLFVEQHKHYLDEIIEQISEFSKRVILADANLDKVLSAYNKHRDKPIREQAENIIHLFTLTNLGAPAAFKYFDTTIDRKRYTSTKEVLDATLIHQSITGLYETRIDLSQLGGDGGGGGGGSPAPGGMDLLKPLTVERKGVKIKGYWNSQADITCVPKDLLQGEEPVRQQNVTTIHGTQEGDVYYVNLKIDGRRINTEVIGTTLDYAIITPGDVPWILKKPLELTIKLDLEEQQGTLLNNSILSKKGKEELKQLFEKYSALWQSWENQVGHRRIRPHKIATGTVKPTPQKQYHINPKAKPDIQIVINDLLKQGVLIQKESTMNTPVYPVPKPNGRWRMVLDYRAVNKVTPLIAVQNQHSYGILGSLFKGRYKTTIDLSNGFWAHPIVPEDYWITAFTWQGKQYCWTVLPQGFLNSPGLFTGDVVDLLQGIPNVEVYVDDVYISHDSEKEHLEYLDILFNRLKEAGYIISLKKSNIANSIVDFLGFQITNEGRGLTDTFKEKLENITAPTTLKQLQSILGLLNFARNFIPDFTELIAPLYALIPKSTKNYVPWQIEHSTTLETLITKLNGAEYLQGRKGDKTLIMKVNASYTTGYIRYYNEGEKKPISYVSIVFSKTELKFTELEKLLTTVHKGLLKALDLSMGQNIHVYSPIVSMQNIQKTPQTAKKALASRWLSWLSYLEDPRIRFFYDPQMPALKDLPAVDTGKDNKKHPSNFQHIFYTDGSAITSPTKEGHLNAGMGIVYFINKDGNLQKQQEWSISLGNHTAQFAEIAAFEFALKKCLPLGGNILVVTDSNYVAKAYNEELDVWASNGFVNNRKKPLKHISKWKSVADLKRLRPDVVVTHEPGHQKLDSSPHAYGNNLADQLATQASFKVHAGKRTADGSEFEKRTADGSEFESPKKKAKVE

SEQ ID NO: 6995 - protein, 2093 aa, synthetic construct
MPAAKRVKLDGGDKKYSIGLDIGTNSVGWAVITDEYKVPSKKFKVLGNTDRHSIKKNLIGALLFDSGETAEATRLKRTARRRYTRRKNRICYLQEIFSNEMAKVDDSFFHRLEESFLVEEDKKHERHPIFGNIVDEVAYHEKYPTIYHLRKKLVDSTDKADLRLIYLALAHMIKFRGHFLIEGDLNPDNSDVDKLFIQLVQTYNQLFEENPINASGVDAKAILSARLSKSRRLENLIAQLPGEKKNGLFGNLIALSLGLTPNFKSNFDLAEDAKLQLSKDTYDDDLDNLLAQIGDQYADLFLAAKNLSDAILLSDILRVNTEITKAPLSASMIKRYDEHHQDLTLLKALVRQQLPEKYKEIFFDQSKNGYAGYIDGGASQEEFYKFIKPILEKMDGTEELLVKLNREDLLRKQRTFDNGSIPHQIHLGELHAILRRQEDFYPFLKDNREKIEKILTFRIPYYVGPLARGNSRFAWMTRKSEETITPWNFEEVVDKGASAQSFIERMTNFDKNLPNEKVLPKHSLLYEYFTVYNELTKVKYVTEGMRKPAFLSGEQKKAIVDLLFKTNRKVTVKQLKEDYFKKIECFDSVEISGVEDRFNASLGTYHDLLKIIKDKDFLDNEENEDILEDIVLTLTLFEDREMIEERLKTYAHLFDDKVMKQLKRRRYTGWGRLSRKLINGIRDKQSGKTILDFLKSDGFANRNFMQLIHDDSLTFKEDIQKAQVSGQGDSLHEHIANLAGSPAIKKGILQTVKVVDELVKVMGRHKPENIVIEMARENQTTQKGQKNSRERMKRIEEGIKELGSQILKEHPVENTQLQNEKLYLYYLQNGRDMYVDQELDINRLSDYDVDHIVPQSFLKDDSIDNKVLTRSDKARGKSDNVPSEEVVKKMKNYWRQLLNAKLITQRKFDNLTKAERGGLSELDKAGFIKRQLVETRQITKHVAQILDSRMNTKYDENDKLIREVKVITLKSKLVSDFRKDFQFYKVREINNYHHAHDAYLNAVVGTALIKKYPKLESEFVYGDYKVYDVRKMIAKSEQEIGKATAKYFFYSNIMNFFKTEITLANGEIRKRPLIETNGETGEIVWDKGRDFATVRKVLSMPQVNIVKKTEVQTGGFSKESILPKRNSDKLIARKKDWDPKKYGGFDSPTVAYSVLVVAKVEKGKSKKLKSVKELLGITIMERSSFEKNPIDFLEAKGYKEVKKDLIIKLPKYSLFELENGRKRMLASAGELQKGNELALPSKYVNFLYLASHYEKLKGSPEDNEQKQLFVEQHKHYLDEIIEQISEFSKRVILADANLDKVLSAYNKHRDKPIREQAENIIHLFTLTNLGAPAAFKYFDTTIDRKRYTSTKEVLDATLIHQSITGLYETRIDLSQLGGDGGGGGGGSPAPGGTLQLEEEYRLFEPESTQKQEMDIWLKNFPQAWAETGGMGTAHCQAPVLIQLKATATPISIRQYPMPHEAYQGIKPHIRRMLDQGILKPCQSPWNTPLLPVKKPGTEDYRPVQDLREVNKRVEDIHPTVPNPYNLLSTLPPSHPWYTVLDLKDAFFCLRLHSESQLLFAFEWRDPEIGLSGQLTWTRLPQGFKNSPTLFDEALHSDLADFRVRYPALVLLQYVDDLLLAAATRTECLEGTKALLETLGNKGYRASAKKAQICLQEVTYLGYSLKDGQRWLTKARKEAILSIPVPKNSRQVREFLGTAGYCRLWIPGFAELAAPLYPLTRPGTLFQWGTEQQLAFEDIKKALLSSPALGLPDITKPFELFIDENSGFAKGVLVQKLGPWKRPVAYLSKKLDTVASGWPPCLRMVAAIAILVKDAGKLTLGQPLTILTSHPVEALVRQPPNKWLSNARMTHYQAMLLDAERVHFGPTVSLNPATLLPLPSGGNHHDCLQILAETHGTRPDLTDQPLPDADLTWYTDGSSFIRNGEREAGAAVTTESEVIWAAPLPPGTSAQRAELIALTQALKMAEGKKLTVYTDSRYAFATTHVHGEIYRRRGLLTSEGKEIKNKNEILALLEALFLPKRLSIIHCPGHQKGDSPQAKGNRLADDTAKKAATETHSSLTVLPAGKRTADGSEFEKRTADGSEFESPKKKAKVE

SEQ ID NO: 6996 - protein, 2085 aa, synthetic construct
MPAAKRVKLDGGDKKYSIGLDIGTNSVGWAVITDEYKVPSKKFKVLGNTDRHSIKKNLIGALLFDSGETAEATRLKRTARRRYTRRKNRICYLQEIFSNEMAKVDDSFFHRLEESFLVEEDKKHERHPIFGNIVDEVAYHEKYPTIYHLRKKLVDSTDKADLRLIYLALAHMIKFRGHFLIEGDLNPDNSDVDKLFIQLVQTYNQLFEENPINASGVDAKAILSARLSKSRRLENLIAQLPGEKKNGLFGNLIALSLGLTPNFKSNFDLAEDAKLQLSKDTYDDDLDNLLAQIGDQYADLFLAAKNLSDAILLSDILRVNTEITKAPLSASMIKRYDEHHQDLTLLKALVRQQLPEKYKEIFFDQSKNGYAGYIDGGASQEEFYKFIKPILEKMDGTEELLVKLNREDLLRKQRTFDNGSIPHQIHLGELHAILRRQEDFYPFLKDNREKIEKILTFRIPYYVGPLARGNSRFAWMTRKSEETITPWNFEEVVDKGASAQSFIERMTNFDKNLPNEKVLPKHSLLYEYFTVYNELTKVKYVTEGMRKPAFLSGEQKKAIVDLLFKTNRKVTVKQLKEDYFKKIECFDSVEISGVEDRFNASLGTYHDLLKIIKDKDFLDNEENEDILEDIVLTLTLFEDREMIEERLKTYAHLFDDKVMKQLKRRRYTGWGRLSRKLINGIRDKQSGKTILDFLKSDGFANRNFMQLIHDDSLTFKEDIQKAQVSGQGDSLHEHIANLAGSPAIKKGILQTVKVVDELVKVMGRHKPENIVIEMARENQTTQKGQKNSRERMKRIEEGIKELGSQILKEHPVENTQLQNEKLYLYYLQNGRDMYVDQELDINRLSDYDVDHIVPQSFLKDDSIDNKVLTRSDKARGKSDNVPSEEVVKKMKNYWRQLLNAKLITQRKFDNLTKAERGGLSELDKAGFIKRQLVETRQITKHVAQILDSRMNTKYDENDKLIREVKVITLKSKLVSDFRKDFQFYKVREINNYHHAHDAYLNAVVGTALIKKYPKLESEFVYGDYKVYDVRKMIAKSEQEIGKATAKYFFYSNIMNFFKTEITLANGEIRKRPLIETNGETGEIVWDKGRDFATVRKVLSMPQVNIVKKTEVQTGGFSKESILPKRNSDKLIARKKDWDPKKYGGFDSPTVAYSVLVVAKVEKGKSKKLKSVKELLGITIMERSSFEKNPIDFLEAKGYKEVKKDLIIKLPKYSLFELENGRKRMLASAGELQKGNELALPSKYVNFLYLASHYEKLKGSPEDNEQKQLFVEQHKHYLDEIIEQISEFSKRVILADANLDKVLSAYNKHRDKPIREQAENIIHLFTLTNLGAPAAFKYFDTTIDRKRYTSTKEVLDATLIHQSITGLYETRIDLSQLGGDGGGGGGGSPAPGGVPWLTQQPLQLTILVPLQEYQEKILSKTALPEDQKQQLKTLFVKYDNLWQHWENQVGHRKIRPHNIATGDYPPRPQKQYPINPKAKPSIQIVIDDLLKQGVLTPQNSTMNTPVYPVPKPDGRWRMVLDYREVNKTIPLTAAQNQHSAGILATIVRQKYKTTLDLANGFWAHPITPESYWLTAFTWQGKQYCWTRLPQGFLNSPALFNADVVDLLKEIPNVQVYVDDIYLSHDDPKEHVQQLEKVFQILLQAGYVVSLKKSEIGQKTVEFLGFNITKEGRGLTDTFKTKLLNITPPKDLKQLQSILGLLNFARNFIPNFAELVQPLYNLIAPAKGKYIEWSEENTKQLNMVIEALNTASNLEERLPEQRLVIKVNTSPSAGYVRYYNETGKKPIMYLNYVFSKAELKFSMLEKLLTTMHKALIKAMDLAMGQEILVYSPIVSMTKIQKTPLPERKALPIRWITWMTYLEDPRIQFHYDKTLPELKHIPDVYTSSQSPVKHPSQYEGVFYTDGSAIKSPDPTKSNNAGMGIVHATYKPEYQVLNQWSIPLGNHTAQMAEIAAVEFACKKALKIPGPVLVITDSFYVAESANKELPYWKSNGFVNNKKKPLKHISKWKSIAECLSMKPDITIQHEKGISLQIPVFILKGNALADKLATQGSYVVNAGKRTADGSEFEKRTADGSEFESPKKKAKVE

SEQ ID NO: 6997 - protein, 2085 aa, synthetic construct
MPAAKRVKLDGGDKKYSIGLDIGTNSVGWAVITDEYKVPSKKFKVLGNTDRHSIKKNLIGALLFDSGETAEATRLKRTARRRYTRRKNRICYLQEIFSNEMAKVDDSFFHRLEESFLVEEDKKHERHPIFGNIVDEVAYHEKYPTIYHLRKKLVDSTDKADLRLIYLALAHMIKFRGHFLIEGDLNPDNSDVDKLFIQLVQTYNQLFEENPINASGVDAKAILSARLSKSRRLENLIAQLPGEKKNGLFGNLIALSLGLTPNFKSNFDLAEDAKLQLSKDTYDDDLDNLLAQIGDQYADLFLAAKNLSDAILLSDILRVNTEITKAPLSASMIKRYDEHHQDLTLLKALVRQQLPEKYKEIFFDQSKNGYAGYIDGGASQEEFYKFIKPILEKMDGTEELLVKLNREDLLRKQRTFDNGSIPHQIHLGELHAILRRQEDFYPFLKDNREKIEKILTFRIPYYVGPLARGNSRFAWMTRKSEETITPWNFEEVVDKGASAQSFIERMTNFDKNLPNEKVLPKHSLLYEYFTVYNELTKVKYVTEGMRKPAFLSGEQKKAIVDLLFKTNRKVTVKQLKEDYFKKIECFDSVEISGVEDRFNASLGTYHDLLKIIKDKDFLDNEENEDILEDIVLTLTLFEDREMIEERLKTYAHLFDDKVMKQLKRRRYTGWGRLSRKLINGIRDKQSGKTILDFLKSDGFANRNFMQLIHDDSLTFKEDIQKAQVSGQGDSLHEHIANLAGSPAIKKGILQTVKVVDELVKVMGRHKPENIVIEMARENQTTQKGQKNSRERMKRIEEGIKELGSQILKEHPVENTQLQNEKLYLYYLQNGRDMYVDQELDINRLSDYDVDHIVPQSFLKDDSIDNKVLTRSDKARGKSDNVPSEEVVKKMKNYWRQLLNAKLITQRKFDNLTKAERGGLSELDKAGFIKRQLVETRQITKHVAQILDSRMNTKYDENDKLIREVKVITLKSKLVSDFRKDFQFYKVREINNYHHAHDAYLNAVVGTALIKKYPKLESEFVYGDYKVYDVRKMIAKSEQEIGKATAKYFFYSNIMNFFKTEITLANGEIRKRPLIETNGETGEIVWDKGRDFATVRKVLSMPQVNIVKKTEVQTGGFSKESILPKRNSDKLIARKKDWDPKKYGGFDSPTVAYSVLVVAKVEKGKSKKLKSVKELLGITIMERSSFEKNPIDFLEAKGYKEVKKDLIIKLPKYSLFELENGRKRMLASAGELQKGNELALPSKYVNFLYLASHYEKLKGSPEDNEQKQLFVEQHKHYLDEIIEQISEFSKRVILADANLDKVLSAYNKHRDKPIREQAENIIHLFTLTNLGAPAAFKYFDTTIDRKRYTSTKEVLDATLIHQSITGLYETRIDLSQLGGDGGGGGGGSPAPGGVPWLTQQPLQLTILVPLQEYQEKILSKTALPEDQKQQLKTLFVKYDNLWQHWENQVGHRKIRPHNIATGDYPPRPQKQYPINPKAKPSIQIVIDDLLKQGVLTPQNSTMNTPVYPVPKPDGRWRMVLDYREVNKTIPLTAAQNQHSAGILATIVRQKYKTTLDLANGFWAHPITPESYWLTAFTWQGKQYCWTRLPQGFLNSPALFNADVVDLLKEIPNVQVYVDDIYLSHDDPKEHVQQLEKVFQILLQAGYVVSLKKSEIGQKTVEFLGFNITKEGRGLTDTFKTKLLNITPPKDLKQLQSILGKLNFARNFIPNFAELVQPLYNLIAPAKGKYIEWSEENTKQLNMVIEALNTASNLEERLPEQRLVIKVNTSPSAGYVRYYNETGKKPIMYLNYVFSKAELKFSMLEKLLTTMHKALIKAMDLAMGQEILVYSPIVSMTKIQKTPLPERKALPIRWITWMTYLEDPRIQFHYDKTLPELKHIPDVYTSSQSPVKHPSQYEGVFYTDGSAIKSPDPTKSNNAGMGIVHATYKPEYQVLNQWSIPLGNHTAQMAEIAAVEFACKKALKIPGPVLVITDSFYVAESANKELPYWKSNGFVNNKKKPLKHISKWKSIAECLSMKPDITIQHEKGISLQIPVFILKGNALADKLATQGSYVVNAGKRTADGSEFEKRTADGSEFESPKKKAKVE

SEQ ID NO: 6998 - protein, 2094 aa, synthetic construct; identical to SEQ ID NO: 4520

SEQ ID NO: 6999 - protein, 2094 aa, synthetic construct
MPAAKRVKLDGGDKKYSIGLDIGTNSVGWAVITDEYKVPSKKFKVLGNTDRHSIKKNLIGALLFDSGETAEATRLKRTARRRYTRRKNRICYLQEIFSNEMAKVDDSFFHRLEESFLVEEDKKHERHPIFGNIVDEVAYHEKYPTIYHLRKKLVDSTDKADLRLIYLALAHMIKFRGHFLIEGDLNPDNSDVDKLFIQLVQTYNQLFEENPINASGVDAKAILSARLSKSRRLENLIAQLPGEKKNGLFGNLIALSLGLTPNFKSNFDLAEDAKLQLSKDTYDDDLDNLLAQIGDQYADLFLAAKNLSDAILLSDILRVNTEITKAPLSASMIKRYDEHHQDLTLLKALVRQQLPEKYKEIFFDQSKNGYAGYIDGGASQEEFYKFIKPILEKMDGTEELLVKLNREDLLRKQRTFDNGSIPHQIHLGELHAILRRQEDFYPFLKDNREKIEKILTFRIPYYVGPLARGNSRFAWMTRKSEETITPWNFEEVVDKGASAQSFIERMTNFDKNLPNEKVLPKHSLLYEYFTVYNELTKVKYVTEGMRKPAFLSGEQKKAIVDLLFKTNRKVTVKQLKEDYFKKIECFDSVEISGVEDRFNASLGTYHDLLKIIKDKDFLDNEENEDILEDIVLTLTLFEDREMIEERLKTYAHLFDDKVMKQLKRRRYTGWGRLSRKLINGIRDKQSGKTILDFLKSDGFANRNFMQLIHDDSLTFKEDIQKAQVSGQGDSLHEHIANLAGSPAIKKGILQTVKVVDELVKVMGRHKPENIVIEMARENQTTQKGQKNSRERMKRIEEGIKELGSQILKEHPVENTQLQNEKLYLYYLQNGRDMYVDQELDINRLSDYDVDHIVPQSFLKDDSIDNKVLTRSDKARGKSDNVPSEEVVKKMKNYWRQLLNAKLITQRKFDNLTKAERGGLSELDKAGFIKRQLVETRQITKHVAQILDSRMNTKYDENDKLIREVKVITLKSKLVSDFRKDFQFYKVREINNYHHAHDAYLNAVVGTALIKKYPKLESEFVYGDYKVYDVRKMIAKSEQEIGKATAKYFFYSNIMNFFKTEITLANGEIRKRPLIETNGETGEIVWDKGRDFATVRKVLSMPQVNIVKKTEVQTGGFSKESILPKRNSDKLIARKKDWDPKKYGGFDSPTVAYSVLVVAKVEKGKSKKLKSVKELLGITIMERSSFEKNPIDFLEAKGYKEVKKDLIIKLPKYSLFELENGRKRMLASAGELQKGNELALPSKYVNFLYLASHYEKLKGSPEDNEQKQLFVEQHKHYLDEIIEQISEFSKRVILADANLDKVLSAYNKHRDKPIREQAENIIHLFTLTNLGAPAAFKYFDTTIDRKRYTSTKEVLDATLIHQSITGLYETRIDLSQLGGDGGGGGGGSPAPGGTLGIEDEYRLHETSTEPDVSLGSTWLSDFPQAWAETGGMGLAVRQAPLIIPLKATSTPVSIQQYPMSHEARLGIKPHIQRLLDQGILVPCQSPWNTPLLPVKKPGTNDYRPVQDLREVNKRVEDIHPTVPNPYNLLSGLPPSHQWYTVLDLKDAFFCLRLHPTSQPLFAFEWRDPGMGISGQLTWTRLPQGFKNSPTLFNEALHRDLADFRIQHPDLILLQYVDDILLAATSELDCQQGTRALLQTLGDLGYRASAKKAQICQKQVKYLGYLLREGQRWLTEARKETVMGQPVPKTPRQLREFLGTAGFCRLWIPGFAEMAAPLYPLTKPGTLFSWGPDQQKAYQEIKQALLTAPALGLPDLTKPFELFVDEKQGYAKGVLTQKLGPWRRPVAYLSKKLDPVAAGWPPCLRMVAAIAVLTKDAGKLTMGQPLVILAPHAVEALVKQPPDRWLSNARMTHYQAMLLDTDRVQFGPVVALNPATLLPLPEEGAPHDCLEILAETHGTRPDLTDQPIPDADHTWYTDGSSFLQEGQRKAGAAVTTETEVIWAGALPAGTSAQRAELIALTQALKMAEGKRLNVYTDSRYAFATAHIHGEIYRRRGWLTSEGREIKNKSEILALLKALFLPKRLSIIHCLGHQKGDSAEARGNRLADQAAREAAIKTPPDTSTLLAGKRTADGSEFEKRTADGSEFESPKKKAKVE

SEQ ID NO: 7000 - protein, 2094 aa, synthetic construct
MPAAKRVKLDGGDKKYSIGLDIGTNSVGWAVITDEYKVPSKKFKVLGNTDRHSIKKNLIGALLFDSGETAEATRLKRTARRRYTRRKNRICYLQEIFSNEMAKVDDSFFHRLEESFLVEEDKKHERHPIFGNIVDEVAYHEKYPTIYHLRKKLVDSTDKADLRLIYLALAHMIKFRGHFLIEGDLNPDNSDVDKLFIQLVQTYNQLFEENPINASGVDAKAILSARLSKSRRLENLIAQLPGEKKNGLFGNLIALSLGLTPNFKSNFDLAEDAKLQLSKDTYDDDLDNLLAQIGDQYADLFLAAKNLSDAILLSDILRVNTEITKAPLSASMIKRYDEHHQDLTLLKALVRQQLPEKYKEIFFDQSKNGYAGYIDGGASQEEFYKFIKPILEKMDGTEELLVKLNREDLLRKQRTFDNGSIPHQIHLGELHAILRRQEDFYPFLKDNREKIEKILTFRIPYYVGPLARGNSRFAWMTRKSEETITPWNFEEVVDKGASAQSFIERMTNFDKNLPNEKVLPKHSLLYEYFTVYNELTKVKYVTEGMRKPAFLSGEQKKAIVDLLFKTNRKVTVKQLKEDYFKKIECFDSVEISGVEDRFNASLGTYHDLLKIIKDKDFLDNEENEDILEDIVLTLTLFEDREMIEERLKTYAHLFDDKVMKQLKRRRYTGWGRLSRKLINGIRDKQSGKTILDFLKSDGFANRNFMQLIHDDSLTFKEDIQKAQVSGQGDSLHEHIANLAGSPAIKKGILQTVKVVDELVKVMGRHKPENIVIEMARENQTTQKGQKNSRERMKRIEEGIKELGSQILKEHPVENTQLQNEKLYLYYLQNGRDMYVDQELDINRLSDYDVDHIVPQSFLKDDSIDNKVLTRSDKARGKSDNVPSEEVVKKMKNYWRQLLNAKLITQRKFDNLTKAERGGLSELDKAGFIKRQLVETRQITKHVAQILDSRMNTKYDENDKLIREVKVITLKSKLVSDFRKDFQFYKVREINNYHHAHDAYLNAVVGTALIKKYPKLESEFVYGDYKVYDVRKMIAKSEQEIGKATAKYFFYSNIMNFFKTEITLANGEIRKRPLIETNGETGEIVWDKGRDFATVRKVLSMPQVNIVKKTEVQTGGFSKESILPKRNSDKLIARKKDWDPKKYGGFDSPTVAYSVLVVAKVEKGKSKKLKSVKELLGITIMERSSFEKNPIDFLEAKGYKEVKKDLIIKLPKYSLFELENGRKRMLASAGELQKGNELALPSKYVNFLYLASHYEKLKGSPEDNEQKQLFVEQHKHYLDEIIEQISEFSKRVILADANLDKVLSAYNKHRDKPIREQAENIIHLFTLTNLGAPAAFKYFDTTIDRKRYTSTKEVLDATLIHQSITGLYETRIDLSQLGGDGGGGGGGSPAPGGTLNIEDEYRLHETSKEPDVSLGSTWLSDFPQAWAETGGMGLAVRQAPLIIPLKATSTPVSIKQYPMSQEARLGIKPHIQRLLDQGILVPCQSPWNTPLLPVKKPGTNDYRPVQDLREVNKRVEDIHPTVPNPYNLLSGLPPSHQWYTVLDLKDAFFCLRLHPTSQPLFAFEWRDPEMGISGQLTWTRLPQGFKNSPTLFDEALHRDLAGFRIQHPDLILLQYVDDLLLAATSELDCQQGTRALLQTLGDLGYRASAKKAQICQKQVKYLGYLLKEGQRWLTEARKETVMGQPIPKTPRQLREFLGTAGFCRLWIPGFAEMAAPLYPLTKTGTLFNWGPDQQKAFQEIKQALLTAPALGLPDLTKPFELFVDEKQGYAKGVLTQKLGPWRRPVAYLSKKLDPVAAGWPPCLRMVAAIAVLTKDAGKLTMGQPLVILAPHAVEALVKQPPDRWLSNARMTHYQALLLDTDRVQFGPVVALNPATLLPLPEEGLQHDCLDILAEAHGTRSDLMDQPLPDADHTWYTDGSSFLQEGQRKAGAAVTTETEVIWARALPAGTSAQRAELIALTQALKMAEGKKLNVYTDSRYAFATAHIHGEIYRRRGLLTSEGKEIKNKDEILALLKALFLPKRLSIIHCPGHQKGNSAEARGNRMADQAAREVATRETPETSTLLAGKRTADGSEFEKRTADGSEFESPKKKAKVE

SEQ ID NO: 7001 - protein, 2094 aa, synthetic construct
MPAAKRVKLDGGDKKYSIGLDIGTNSVGWAVITDEYKVPSKKFKVLGNTDRHSIKKNLIGALLFDSGETAEATRLKRTARRRYTRRKNRICYLQEIFSNEMAKVDDSFFHRLEESFLVEEDKKHERHPIFGNIVDEVAYHEKYPTIYHLRKKLVDSTDKADLRLIYLALAHMIKFRGHFLIEGDLNPDNSDVDKLFIQLVQTYNQLFEENPINASGVDAKAILSARLSKSRRLENLIAQLPGEKKNGLFGNLIALSLGLTPNFKSNFDLAEDAKLQLSKDTYDDDLDNLLAQIGDQYADLFLAAKNLSDAILLSDILRVNTEITKAPLSASMIKRYDEHHQDLTLLKALVRQQLPEKYKEIFFDQSKNGYAGYIDGGASQEEFYKFIKPILEKMDGTEELLVKLNREDLLRKQRTFDNGSIPHQIHLGELHAILRRQEDFYPFLKDNREKIEKILTFRIPYYVGPLARGNSRFAWMTRKSEETITPWNFEEVVDKGASAQSFIERMTNFDKNLPNEKVLPKHSLLYEYFTVYNELTKVKYVTEGMRKPAFLSGEQKKAIVDLLFKTNRKVTVKQLKEDYFKKIECFDSVEISGVEDRFNASLGTYHDLLKIIKDKDFLDNEENEDILEDIVLTLTLFEDREMIEERLKTYAHLFDDKVMKQLKRRRYTGWGRLSRKLINGIRDKQSGKTILDFLKSDGFANRNFMQLIHDDSLTFKEDIQKAQVSGQGDSLHEHIANLAGSPAIKKGILQTVKVVDELVKVMGRHKPENIVIEMARENQTTQKGQKNSRERMKRIEEGIKELGSQILKEHPVENTQLQNEKLYLYYLQNGRDMYVDQELDINRLSDYDVDHIVPQSFLKDDSIDNKVLTRSDKARGKSDNVPSEEVVKKMKNYWRQLLNAKLITQRKFDNLTKAERGGLSELDKAGFIKRQLVETRQITKHVAQILDSRMNTKYDENDKLIREVKVITLKSKLVSDFRKDFQFYKVREINNYHHAHDAYLNAVVGTALIKKYPKLESEFVYGDYKVYDVRKMIAKSEQEIGKATAKYFFYSNIMNFFKTEITLANGEIRKRPLIETNGETGEIVWDKGRDFATVRKVLSMPQVNIVKKTEVQTGGFSKESILPKRNSDKLIARKKDWDPKKYGGFDSPTVAYSVLVVAKVEKGKSKKLKSVKELLGITIMERSSFEKNPIDFLEAKGYKEVKKDLIIKLPKYSLFELENGRKRMLASAGELQKGNELALPSKYVNFLYLASHYEKLKGSPEDNEQKQLFVEQHKHYLDEIIEQISEFSKRVILADANLDKVLSAYNKHRDKPIREQAENIIHLFTLTNLGAPAAFKYFDTTIDRKRYTSTKEVLDATLIHQSITGLYETRIDLSQLGGDGGGGGGGSPAPGGTLNIEDEYRLHETSKEPDVSLGSTWLSDFPQAWAETGGMGLAVRQAPLIIPLKATSTPVSIKQYPMSQEARLGIKPHIQRLLDQGILVPCQSPWNTPLLPVKKPGTNDYRPVQDLREVNKRVEDIHPTVPNPYNLLSGLPPSHQWYTVLDLKDAFFCLRLHPTSQPLFAFEWRDPEMGISGQLTWTRLPQGFKNSPTLFNEALHRDLAGFRIQHPDLILLQYVDDLLLAATSELDCQQGTRALLQTLGDLGYRASAKKAQICQKQVKYLGYLLKEGQRWLTEARKETVMGQPIPKTPRQLREFLGTAGFCRLWIPGFAEMAAPLYPLTKPGTLFNWGPDQQKAFQEIKQALLTAPALGLPDLTKPFELFVDEKQGYAKGVLTQKLGPWRRPVAYLSKKLDPVAAGWPPCLRMVAAIAVLTKDAGKLTMGQPLVILAPHAVEALVKQPPDRWLSNARMTHYQALLLDTDRVQFGPVVALNPATLLPLPEEGLQHDCLDILAEAHGTRSDLMDQPLPDADHTWYTDGSSFLQEGQRKAGAAVTTETEVIWARALPAGTSAQRAELIALTQALKMAEGKKLNVYTDSRYAFATAHIHGEIYRRRGWLTSEGKEIKNKDEILALLKALFLPKRLSIIHCPGHQKGNSAEARGNRMADQAAREVATRETPETSTLLAGKRTADGSEFEKRTADGSEFESPKKKAKVE

SEQ ID NO: 7002 - protein, 2114 aa, synthetic construct
MPAAKRVKLDGGDKKYSIGLDIGTNSVGWAVITDEYKVPSKKFKVLGNTDRHSIKKNLIGALLFDSGETAEATRLKRTARRRYTRRKNRICYLQEIFSNEMAKVDDSFFHRLEESFLVEEDKKHERHPIFGNIVDEVAYHEKYPTIYHLRKKLVDSTDKADLRLIYLALAHMIKFRGHFLIEGDLNPDNSDVDKLFIQLVQTYNQLFEENPINASGVDAKAILSARLSKSRRLENLIAQLPGEKKNGLFGNLIALSLGLTPNFKSNFDLAEDAKLQLSKDTYDDDLDNLLAQIGDQYADLFLAAKNLSDAILLSDILRVNTEITKAPLSASMIKRYDEHHQDLTLLKALVRQQLPEKYKEIFFDQSKNGYAGYIDGGASQEEFYKFIKPILEKMDGTEELLVKLNREDLLRKQRTFDNGSIPHQIHLGELHAILRRQEDFYPFLKDNREKIEKILTFRIPYYVGPLARGNSRFAWMTRKSEETITPWNFEEVVDKGASAQSFIERMTNFDKNLPNEKVLPKHSLLYEYFTVYNELTKVKYVTEGMRKPAFLSGEQKKAIVDLLFKTNRKVTVKQLKEDYFKKIECFDSVEISGVEDRFNASLGTYHDLLKIIKDKDFLDNEENEDILEDIVLTLTLFEDREMIEERLKTYAHLFDDKVMKQLKRRRYTGWGRLSRKLINGIRDKQSGKTILDFLKSDGFANRNFMQLIHDDSLTFKEDIQKAQVSGQGDSLHEHIANLAGSPAIKKGILQTVKVVDELVKVMGRHKPENIVIEMARENQTTQKGQKNSRERMKRIEEGIKELGSQILKEHPVENTQLQNEKLYLYYLQNGRDMYVDQELDINRLSDYDVDHIVPQSFLKDDSIDNKVLTRSDKARGKSDNVPSEEVVKKMKNYWRQLLNAKLITQRKFDNLTKAERGGLSELDKAGFIKRQLVETRQITKHVAQILDSRMNTKYDENDKLIREVKVITLKSKLVSDFRKDFQFYKVREINNYHHAHDAYLNAVVGTALIKKYPKLESEFVYGDYKVYDVRKMIAKSEQEIGKATAKYFFYSNIMNFFKTEITLANGEIRKRPLIETNGETGEIVWDKGRDFATVRKVLSMPQVNIVKKTEVQTGGFSKESILPKRNSDKLIARKKDWDPKKYGGFDSPTVAYSVLVVAKVEKGKSKKLKSVKELLGITIMERSSFEKNPIDFLEAKGYKEVKKDLIIKLPKYSLFELENGRKRMLASAGELQKGNELALPSKYVNFLYLASHYEKLKGSPEDNEQKQLFVEQHKHYLDEIIEQISEFSKRVILADANLDKVLSAYNKHRDKPIREQAENIIHLFTLTNLGAPAAFKYFDTTIDRKRYTSTKEVLDATLIHQSITGLYETRIDLSQLGGDGGGGGGGSPAPGGVQEISDSRPMLHIYLNGRRFLGLLDTGADKTCIAGRDWPANWPIHQTESSLQGLGMACGVARSSQPLRWQHEDKSGIIHPFVIPTLPFTLWGRDIMKDIKVRLMTDSPDDSQDLMIGAIESNLFADQISWKSDQPVWLNQWPLKQEKLQALQQLVTEQLQLGHLEESNSPWNTPVFVIKKKSGKWRLLQDLRAVNATMHDMGALQPGLPSPVAVPKGWEIIIIDLQDCFFNIKLHPEDCKRFAFSVPSPNFKRPYQRFQWKVLPQGMKNSPTLCQKFVDKAILTVRDKYQDSYIVHYMDDILLAHPSRSIVDEILTSMIQALNKHGLVVSTEKIQKYDNLKYLGTHIQGDSVSYQKLQIRTDKLRTLNDFQKLLGNINWIRPFLKLTTGELKPLFEILNGDSNPISTRKLTPEACKALQLMNERLSTARVKRLDLSQPWSLCILKTEYTPTACLWQDGVVEWIHLPHISPKVITPYDIFCTQLIIKGRHRSKELFSKDPDYIVVPYTKVQFDLLLQEKEDWPISLLGFLGEVHFHLPKDPLLTFTLQTAIIFPHMTSTTPLEKGIVIFTDGSANGRSVTYIQGREPIIKENTQNTAQQAEIVAVITAFEEVSQPFNLYTDSKYVTGLFPEIETATLSPRTKIYTELKHLQRLIHKRQEKFYIGHIRGHTGLPGPLAQGNAYADSLTRILTAAGKRTADGSEFEKRTADGSEFESPKKKAKVE

SEQ ID NO: 7003 - protein, 2088 aa, synthetic construct
MPAAKRVKLDGGDKKYSIGLDIGTNSVGWAVITDEYKVPSKKFKVLGNTDRHSIKKNLIGALLFDSGETAEATRLKRTARRRYTRRKNRICYLQEIFSNEMAKVDDSFFHRLEESFLVEEDKKHERHPIFGNIVDEVAYHEKYPTIYHLRKKLVDSTDKADLRLIYLALAHMIKFRGHFLIEGDLNPDNSDVDKLFIQLVQTYNQLFEENPINASGVDAKAILSARLSKSRRLENLIAQLPGEKKNGLFGNLIALSLGLTPNFKSNFDLAEDAKLQLSKDTYDDDLDNLLAQIGDQYADLFLAAKNLSDAILLSDILRVNTEITKAPLSASMIKRYDEHHQDLTLLKALVRQQLPEKYKEIFFDQSKNGYAGYIDGGASQEEFYKFIKPILEKMDGTEELLVKLNREDLLRKQRTFDNGSIPHQIHLGELHAILRRQEDFYPFLKDNREKIEKILTFRIPYYVGPLARGNSRFAWMTRKSEETITPWNFEEVVDKGASAQSFIERMTNFDKNLPNEKVLPKHSLLYEYFTVYNELTKVKYVTEGMRKPAFLSGEQKKAIVDLLFKTNRKVTVKQLKEDYFKKIECFDSVEISGVEDRFNASLGTYHDLLKIIKDKDFLDNEENEDILEDIVLTLTLFEDREMIEERLKTYAHLFDDKVMKQLKRRRYTGWGRLSRKLINGIRDKQSGKTILDFLKSDGFANRNFMQLIHDDSLTFKEDIQKAQVSGQGDSLHEHIANLAGSPAIKKGILQTVKVVDELVKVMGRHKPENIVIEMARENQTTQKGQKNSRERMKRIEEGIKELGSQILKEHPVENTQLQNEKLYLYYLQNGRDMYVDQELDINRLSDYDVDHIVPQSFLKDDSIDNKVLTRSDKARGKSDNVPSEEVVKKMKNYWRQLLNAKLITQRKFDNLTKAERGGLSELDKAGFIKRQLVETRQITKHVAQILDSRMNTKYDENDKLIREVKVITLKSKLVSDFRKDFQFYKVREINNYHHAHDAYLNAVVGTALIKKYPKLESEFVYGDYKVYDVRKMIAKSEQEIGKATAKYFFYSNIMNFFKTEITLANGEIRKRPLIETNGETGEIVWDKGRDFATVRKVLSMPQVNIVKKTEVQTGGFSKESILPKRNSDKLIARKKDWDPKKYGGFDSPTVAYSVLVVAKVEKGKSKKLKSVKELLGITIMERSSFEKNPIDFLEAKGYKEVKKDLIIKLPKYSLFELENGRKRMLASAGELQKGNELALPSKYVNFLYLASHYEKLKGSPEDNEQKQLFVEQHKHYLDEIIEQISEFSKRVILADANLDKVLSAYNKHRDKPIREQAENIIHLFTLTNLGAPAAFKYFDTTIDRKRYTSTKEVLDATLIHQSITGLYETRIDLSQLGGDGGGGGGGSPAPGGTLQLDDEYRLYSPLVKPDQNIQFWLEQFPQAWAETAGMGLAKQVPPQVIQLKASATPVSVRQYPLSKEAQEGIRPHVQRLIQQGILVPVQSPWNTPLLPVRKPGTNDYRPVQDLREVNKRVQDIHPTVPNPYNLLCALPPQRSWYTVLDLKDAFFCLRLHPTSQPLFAFEWRDPGTGRTGQLTWTRLPQGFKNSPTIFDEALHRDLANFRIQHPQVTLLQYVDDLLLAGATKQDCLEGTKALLLELSDLGYRASAKKAQICRREVTYLGYSLRDGQRWLTEARKKTVVQIPAPTTAKQVREFLGTAGFCRLWIPGFATLAAPLYPLTKEKGEFSWAPEHQKAFDAIKKALLSAPALALPDVTKPFTLYVDERKGVARGVLTQTLGPWRRPVAYLSKKLDPVASGWPVCLKAIAAVAILVKDADKLTLGQNITVIAPHALENIVRQPPDRWMTNARMTHYQSLLLTERVTFAPPAALNPATLLPEETDEPVTHDCHQLLIEETGVRKDLTDIPLTGEVLTWFTDGSSYVVEGKRMAGAAVVDGTRTIWASSLPEGTSAQKAELMALTQALRLAEGKSINIYTDSRYAFATAHVHGAIYKQRGLLTSAGREIKNKEEILSLLEALHLPKRLAIIHCPGHQKAKDPISRGNQMADRVAKQAAQGVNLLAGKRTADGSEFEKRTADGSEFESPKKKAKVE

SEQ ID NO: 7004 - protein, 2174 aa, synthetic construct
MPAAKRVKLDGGDKKYSIGLDIGTNSVGWAVITDEYKVPSKKFKVLGNTDRHSIKKNLIGALLFDSGETAEATRLKRTARRRYTRRKNRICYLQEIFSNEMAKVDDSFFHRLEESFLVEEDKKHERHPIFGNIVDEVAYHEKYPTIYHLRKKLVDSTDKADLRLIYLALAHMIKFRGHFLIEGDLNPDNSDVDKLFIQLVQTYNQLFEENPINASGVDAKAILSARLSKSRRLENLIAQLPGEKKNGLFGNLIALSLGLTPNFKSNFDLAEDAKLQLSKDTYDDDLDNLLAQIGDQYADLFLAAKNLSDAILLSDILRVNTEITKAPLSASMIKRYDEHHQDLTLLKALVRQQLPEKYKEIFFDQSKNGYAGYIDGGASQEEFYKFIKPILEKMDGTEELLVKLNREDLLRKQRTFDNGSIPHQIHLGELHAILRRQEDFYPFLKDNREKIEKILTFRIPYYVGPLARGNSRFAWMTRKSEETITPWNFEEVVDKGASAQSFIERMTNFDKNLPNEKVLPKHSLLYEYFTVYNELTKVKYVTEGMRKPAFLSGEQKKAIVDLLFKTNRKVTVKQLKEDYFKKIECFDSVEISGVEDRFNASLGTYHDLLKIIKDKDFLDNEENEDILEDIVLTLTLFEDREMIEERLKTYAHLFDDKVMKQLKRRRYTGWGRLSRKLINGIRDKQSGKTILDFLKSDGFANRNFMQLIHDDSLTFKEDIQKAQVSGQGDSLHEHIANLAGSPAIKKGILQTVKVVDELVKVMGRHKPENIVIEMARENQTTQKGQKNSRERMKRIEEGIKELGSQILKEHPVENTQLQNEKLYLYYLQNGRDMYVDQELDINRLSDYDVDHIVPQSFLKDDSIDNKVLTRSDKARGKSDNVPSEEVVKKMKNYWRQLLNAKLITQRKFDNLTKAERGGLSELDKAGFIKRQLVETRQITKHVAQILDSRMNTKYDENDKLIREVKVITLKSKLVSDFRKDFQFYKVREINNYHHAHDAYLNAVVGTALIKKYPKLESEFVYGDYKVYDVRKMIAKSEQEIGKATAKYFFYSNIMNFFKTEITLANGEIRKRPLIETNGETGEIVWDKGRDFATVRKVLSMPQVNIVKKTEVQTGGFSKESILPKRNSDKLIARKKDWDPKKYGGFDSPTVAYSVLVVAKVEKGKSKKLKSVKELLGITIMERSSFEKNPIDFLEAKGYKEVKKDLIIKLPKYSLFELENGRKRMLASAGELQKGNELALPSKYVNFLYLASHYEKLKGSPEDNEQKQLFVEQHKHYLDEIIEQISEFSKRVILADANLDKVLSAYNKHRDKPIREQAENIIHLFTLTNLGAPAAFKYFDTTIDRKRYTSTKEVLDATLIHQSITGLYETRIDLSQLGGDGGGGGGGSPAPGGMDPLQLLQPLEAEIKGTKLKAHWNSGATITCVPEAFLEDERPIQTMLIKTIHGEKQQDVYYLTFKVQGRKVEAEVLASPYDYILLNPSDVPWLMKKPLQLTVLVPLHEYQERLLQQTALPKEQKELLQKLFLKYDALWQHWENQVGHRRIKPHNIATGTLAPRPQKQYPINPKAKPSIQIVIDDLLKQGVLIQQNSTMNTPVYPVPKPDGKWRMVLDYREVNKTIPLIAAQNQHSAGILSSIYRGKYKTTLDLTNGFWAHPITPESYWLTAFTWQGKQYCWTRLPQGFLNSPALFNADVVDLLKEIPNVQAYVDDIYISHDDPQEHLEQLEKIFSILLNAGYVVSLKKSEIAQREVEFLGFNITKEGRGLTDTFKQKLLNITPPKDLKQLQSILGLLNFARNFIPNYSELVKPLYTIVAPANGKFISWTEDNSNQLQHIISVLNQADNLEERNPETRLIIKVNSSPSAGYIRYYNEGSKRPIMYVNYIFSKAEAKFTQTEKLLTTMHKGLIKAMDLAMGQEILVYSPIVSMTKIQRTPLPERKALPVRWITWMTYLEDPRIQFHYDKSLPELQQIPNVTEDVIAKTKHPSEFAMVFYTDGSAIKHPDVNKSHSAGMGIAQVQFIPEYKIVHQWSIPLGDHTAQLAEIAAVEFACKKALKISGPVLIVTDSFYVAESANKELPYWKSNGFLNNKKKPLRHVSKWKSIAECLQLKPDIIIMHEKGHQQPMTTLHTEGNNLADKLATQGSYVVHAGKRTADGSEFEKRTADGSEFESPKKKAKVE

SEQ ID NO: 7005 - protein, 2085 aa, synthetic construct
MPAAKRVKLDGGDKKYSIGLDIGTNSVGWAVITDEYKVPSKKFKVLGNTDRHSIKKNLIGALLFDSGETAEATRLKRTARRRYTRRKNRICYLQEIFSNEMAKVDDSFFHRLEESFLVEEDKKHERHPIFGNIVDEVAYHEKYPTIYHLRKKLVDSTDKADLRLIYLALAHMIKFRGHFLIEGDLNPDNSDVDKLFIQLVQTYNQLFEENPINASGVDAKAILSARLSKSRRLENLIAQLPGEKKNGLFGNLIALSLGLTPNFKSNFDLAEDAKLQLSKDTYDDDLDNLLAQIGDQYADLFLAAKNLSDAILLSDILRVNTEITKAPLSASMIKRYDEHHQDLTLLKALVRQQLPEKYKEIFFDQSKNGYAGYIDGGASQEEFYKFIKPILEKMDGTEELLVKLNREDLLRKQRTFDNGSIPHQIHLGELHAILRRQEDFYPFLKDNREKIEKILTFRIPYYVGPLARGNSRFAWMTRKSEETITPWNFEEVVDKGASAQSFIERMTNFDKNLPNEKVLPKHSLLYEYFTVYNELTKVKYVTEGMRKPAFLSGEQKKAIVDLLFKTNRKVTVKQLKEDYFKKIECFDSVEISGVEDRFNASLGTYHDLLKIIKDKDFLDNEENEDILEDIVLTLTLFEDREMIEERLKTYAHLFDDKVMKQLKRRRYTGWGRLSRKLINGIRDKQSGKTILDFLKSDGFANRNFMQLIHDDSLTFKEDIQKAQVSGQGDSLHEHIANLAGSPAIKKGILQTVKVVDELVKVMGRHKPENIVIEMARENQTTQKGQKNSRERMKRIEEGIKELGSQILKEHPVENTQLQNEKLYLYYLQNGRDMYVDQELDINRLSDYDVDHIVPQSFLKDDSIDNKVLTRSDKARGKSDNVPSEEVVKKMKNYWRQLLNAKLITQRKFDNLTKAERGGLSELDKAGFIKRQLVETRQITKHVAQILDSRMNTKYDENDKLIREVKVITLKSKLVSDFRKDFQFYKVREINNYHHAHDAYLNAVVGTALIKKYPKLESEFVYGDYKVYDVRKMIAKSEQEIGKATAKYFFYSNIMNFFKTEITLANGEIRKRPLIETNGETGEIVWDKGRDFATVRKVLSMPQVNIVKKTEVQTGGFSKESILPKRNSDKLIARKKDWDPKKYGGFDSPTVAYSVLVVAKVEKGKSKKLKSVKELLGITIMERSSFEKNPIDFLEAKGYKEVKKDLIIKLPKYSLFELENGRKRMLASAGELQKGNELALPSKYVNFLYLASHYEKLKGSPEDNEQKQLFVEQHKHYLDEIIEQISEFSKRVILADANLDKVLSAYNKHRDKPIREQAENIIHLFTLTNLGAPAAFKYFDTTIDRKRYTSTKEVLDATLIHQSITGLYETRIDLSQLGGDGGGGGGGSPAPGGIPWLMKKPLQLTTLVPLQEYEERLLKQTMLTGSYKEKLQSLFLKYDALWQHWENQVGHRRIKPHHIATGTVNPRPQKQYPINPKAKASIQTVINDLLKQGVLIQQNSIMNTPVYPVPKPDGKWRMVLDYREVNKTIPLIAAQNQHSAGILSSIFRGKYKTTLDLSNGFWAHSITPESYWLTAFTWLGQQYCWTRLPQGFLNSPALFNADVVDLLKEVPNVQVYVDDIYISHDDPREHLEQLEKVFSLLLNAGYVVSLKKSEIAQHEVEFLGFNITKEGRGLTETFKQKLLNITPPRDLKQLQSILGLLNFARNFIPNFSELVKPLYNIIATAPGKYITWTTDNSQQLQNIISMLNSAENLEERNPEVRLIMKVNTSPSAGYIRFYNEFAKRPIMYLNYVYTKAEVKFTNTEKLLTTIHKGLIKALDLGMGQEILVYSPIVSMTKIQKTPLPERKALPIRWITWMSYLEDPRIQFHYDKTLPELQQVPTVTDDIIAKIKHPSEFSMVFYTDGSAIKHPNVNKSHNAGMGIAQVQFKPEFTVINTWSIPLGDHTAQLAEVAAVEFACKKALKIDGPVLIVTDSFYVAESVNKELPYWQSNGFFNNKKKPLKHVSKWKSIADCIQLKPDIIIIHEKGHQPTASTFHTEGNNLADKLATQGSYVVNAGKRTADGSEFEKRTADGSEFESPKKKAKVE

SEQ ID NO: 7006 - protein, 2085 aa, synthetic construct
MPAAKRVKLDGGDKKYSIGLDIGTNSVGWAVITDEYKVPSKKFKVLGNTDRHSIKKNLIGALLFDSGETAEATRLKRTARRRYTRRKNRICYLQEIFSNEMAKVDDSFFHRLEESFLVEEDKKHERHPIFGNIVDEVAYHEKYPTIYHLRKKLVDSTDKADLRLIYLALAHMIKFRGHFLIEGDLNPDNSDVDKLFIQLVQTYNQLFEENPINASGVDAKAILSARLSKSRRLENLIAQLPGEKKNGLFGNLIALSLGLTPNFKSNFDLAEDAKLQLSKDTYDDDLDNLLAQIGDQYADLFLAAKNLSDAILLSDILRVNTEITKAPLSASMIKRYDEHHQDLTLLKALVRQQLPEKYKEIFFDQSKNGYAGYIDGGASQEEFYKFIKPILEKMDGTEELLVKLNREDLLRKQRTFDNGSIPHQIHLGELHAILRRQEDFYPFLKDNREKIEKILTFRIPYYVGPLARGNSRFAWMTRKSEETITPWNFEEVVDKGASAQSFIERMTNFDKNLPNEKVLPKHSLLYEYFTVYNELTKVKYVTEGMRKPAFLSGEQKKAIVDLLFKTNRKVTVKQLKEDYFKKIECFDSVEISGVEDRFNASLGTYHDLLKIIKDKDFLDNEENEDILEDIVLTLTLFEDREMIEERLKTYAHLFDDKVMKQLKRRRYTGWGRLSRKLINGIRDKQSGKTILDFLKSDGFANRNFMQLIHDDSLTFKEDIQKAQVSGQGDSLHEHIANLAGSPAIKKGILQTVKVVDELVKVMGRHKPENIVIEMARENQTTQKGQKNSRERMKRIEEGIKELGSQILKEHPVENTQLQNEKLYLYYLQNGRDMYVDQELDINRLSDYDVDHIVPQSFLKDDSIDNKVLTRSDKARGKSDNVPSEEVVKKMKNYWRQLLNAKLITQRKFDNLTKAERGGLSELDKAGFIKRQLVETRQITKHVAQILDSRMNTKYDENDKLIREVKVITLKSKLVSDFRKDFQFYKVREINNYHHAHDAYLNAVVGTALIKKYPKLESEFVYGDYKVYDVRKMIAKSEQEIGKATAKYFFYSNIMNFFKTEITLANGEIRKRPLIETNGETGEIVWDKGRDFATVRKVLSMPQVNIVKKTEVQTGGFSKESILPKRNSDKLIARKKDWDPKKYGGFDSPTVAYSVLVVAKVEKGKSKKLKSVKELLGITIMERSSFEKNPIDFLEAKGYKEVKKDLIIKLPKYSLFELENGRKRMLASAGELQKGNELALPSKYVNFLYLASHYEKLKGSPEDNEQKQLFVEQHKHYLDEIIEQISEFSKRVILADANLDKVLSAYNKHRDKPIREQAENIIHLFTLTNLGAPAAFKYFDTTIDRKRYTSTKEVLDATLIHQSITGLYETRIDLSQLGGDGGGGGGGSPAPGGIPWLMKKPLQLTTLVPLQEYEERLLKQTMLTGSYKEKLQSLFLKYDALWQHWENQVGHRRIKPHHIATGTVNPRPQKQYPINPKAKASIQTVINDLLKQGVLIQQNSIMNTPVYPVPKPDGKWRMVLDYREVNKTIPLIAAQNQHSAGILSSIFRGKYKTTLDLSNGFWAHSITPESYWLTAFTWLGQQYCWTRLPQGFLNSPALFNADVVDLLKEVPNVQVYVDDIYISHDDPREHLEQLEKVFSLLLNAGYVVSLKKSEIAQHEVEFLGFNITKEGRGLTETFKQKLLNITPPRDLKQLQSILGKLNFARNFIPNFSELVKPLYNIIATAPGKYITWTTDNSQQLQNIISMLNSAENLEERNPEVRLIMKVNTSPSAGYIRFYNEFAKRPIMYLNYVYTKAEVKFTNTEKLLTTIHKGLIKALDLGMGQEILVYSPIVSMTKIQKTPLPERKALPIRWITWMSYLEDPRIQFHYDKTLPELQQVPTVTDDIIAKIKHPSEFSMVFYTDGSAIKHPNVNKSHNAGMGIAQVQFKPEFTVINTWSIPLGDHTAQLAEVAAVEFACKKALKIDGPVLIVTDSFYVAESVNKELPYWQSNGFFNNKKKPLKHVSKWKSIADCIQLKPDIIIIHEKGHQPTASTFHTEGNNLADKLATQGSYVVNAGKRTADGSEFEKRTADGSEFESPKKKAKVE

SEQ ID NO: 7007 - protein, 2174 aa, synthetic construct
MPAAKRVKLDGGDKKYSIGLDIGTNSVGWAVITDEYKVPSKKFKVLGNTDRHSIKKNLIGALLFDSGETAEATRLKRTARRRYTRRKNRICYLQEIFSNEMAKVDDSFFHRLEESFLVEEDKKHERHPIFGNIVDEVAYHEKYPTIYHLRKKLVDSTDKADLRLIYLALAHMIKFRGHFLIEGDLNPDNSDVDKLFIQLVQTYNQLFEENPINASGVDAKAILSARLSKSRRLENLIAQLPGEKKNGLFGNLIALSLGLTPNFKSNFDLAEDAKLQLSKDTYDDDLDNLLAQIGDQYADLFLAAKNLSDAILLSDILRVNTEITKAPLSASMIKRYDEHHQDLTLLKALVRQQLPEKYKEIFFDQSKNGYAGYIDGGASQEEFYKFIKPILEKMDGTEELLVKLNREDLLRKQRTFDNGSIPHQIHLGELHAILRRQEDFYPFLKDNREKIEKILTFRIPYYVGPLARGNSRFAWMTRKSEETITPWNFEEVVDKGASAQSFIERMTNFDKNLPNEKVLPKHSLLYEYFTVYNELTKVKYVTEGMRKPAFLSGEQKKAIVDLLFKTNRKVTVKQLKEDYFKKIECFDSVEISGVEDRFNASLGTYHDLLKIIKDKDFLDNEENEDILEDIVLTLTLFEDREMIEERLKTYAHLFDDKVMKQLKRRRYTGWGRLSRKLINGIRDKQSGKTILDFLKSDGFANRNFMQLIHDDSLTFKEDIQKAQVSGQGDSLHEHIANLAGSPAIKKGILQTVKVVDELVKVMGRHKPENIVIEMARENQTTQKGQKNSRERMKRIEEGIKELGSQILKEHPVENTQLQNEKLYLYYLQNGRDMYVDQELDINRLSDYDVDHIVPQSFLKDDSIDNKVLTRSDKARGKSDNVPSEEVVKKMKNYWRQLLNAKLITQRKFDNLTKAERGGLSELDKAGFIKRQLVETRQITKHVAQILDSRMNTKYDENDKLIREVKVITLKSKLVSDFRKDFQFYKVREINNYHHAHDAYLNAVVGTALIKKYPKLESEFVYGDYKVYDVRKMIAKSEQEIGKATAKYFFYSNIMNFFKTEITLANGEIRKRPLIETNGETGEIVWDKGRDFATVRKVLSMPQVNIVKKTEVQTGGFSKESILPKRNSDKLIARKKDWDPKKYGGFDSPTVAYSVLVVAKVEKGKSKKLKSVKELLGITIMERSSFEKNPIDFLEAKGYKEVKKDLIIKLPKYSLFELENGRKRMLASAGELQKGNELALPSKYVNFLYLASHYEKLKGSPEDNEQKQLFVEQHKHYLDEIIEQISEFSKRVILADANLDKVLSAYNKHRDKPIREQAENIIHLFTLTNLGAPAAFKYFDTTIDRKRYTSTKEVLDATLIHQSITGLYETRIDLSQLGGDGGGGGGGSPAPGGMDPLQLLQPLEAEIKGTKLKAHWNSGATITCVPQAFLEEEVPIKNIWIKTIHGEKEQPVYYLTFKIQGRKVEAEVISSPYDYILVSPSDIPWLMKKPLQLTTLVPLQEYEERLLKQTMLTGSYKEKLQSLFLKYDALWQHWENQVGHRRIKPHHIATGTVNPRPQKQYPINPKAKASIQTVINDLLKQGVLIQQNSIMNTPVYPVPKPDGKWRMVLDYREVNKTIPLIAAQNQHSAGILSSIFRGKYKTTLDLSNGFWAHSITPESYWLTAFTWLGQQYCWTRLPQGFLNSPALFNADVVDLLKEVPNVQVYVDDIYISHDDPREHLEQLEKVFSLLLNAGYVVSLKKSEIAQHEVEFLGFNITKEGRGLTETFKQKLLNITPPRDLKQLQSILGKLNFARNFIPNFSELVKPLYNIIATAPGKYITWTTDNSQQLQNIISMLNSAENLEERNPEVRLIMKVNTSPSAGYIRFYNEFAKRPIMYLNYVYTKAEVKFTNTEKLLTTIHKGLIKALDLGMGQEILVYSPIVSMTKIQKTPLPERKALPIRWITWMSYLEDPRIQFHYDKTLPELQQVPTVTDDIIAKIKHPSEFSMVFYTDGSAIKHPNVNKSHNAGMGIAQVQFKPEFTVINTWSIPLGDHTAQLAEVAAVEFACKKALKIDGPVLIVTDSFYVAESVNKELPYWQSNGFFNNKKKPLKHVSKWKSIADCIQLKPDIIIIHEKGHQPTASTFHTEGNNLADKLATQGSYVVNAGKRTADGSEFEKRTADGSEFESPKKKAKVE

SEQ ID NO: 7008 - protein, 2092 aa, synthetic construct
MPAAKRVKLDGGDKKYSIGLDIGTNSVGWAVITDEYKVPSKKFKVLGNTDRHSIKKNLIGALLFDSGETAEATRLKRTARRRYTRRKNRICYLQEIFSNEMAKVDDSFFHRLEESFLVEEDKKHERHPIFGNIVDEVAYHEKYPTIYHLRKKLVDSTDKADLRLIYLALAHMIKFRGHFLIEGDLNPDNSDVDKLFIQLVQTYNQLFEENPINASGVDAKAILSARLSKSRRLENLIAQLPGEKKNGLFGNLIALSLGLTPNFKSNFDLAEDAKLQLSKDTYDDDLDNLLAQIGDQYADLFLAAKNLSDAILLSDILRVNTEITKAPLSASMIKRYDEHHQDLTLLKALVRQQLPEKYKEIFFDQSKNGYAGYIDGGASQEEFYKFIKPILEKMDGTEELLVKLNREDLLRKQRTFDNGSIPHQIHLGELHAILRRQEDFYPFLKDNREKIEKILTFRIPYYVGPLARGNSRFAWMTRKSEETITPWNFEEVVDKGASAQSFIERMTNFDKNLPNEKVLPKHSLLYEYFTVYNELTKVKYVTEGMRKPAFLSGEQKKAIVDLLFKTNRKVTVKQLKEDYFKKIECFDSVEISGVEDRFNASLGTYHDLLKIIKDKDFLDNEENEDILEDIVLTLTLFEDREMIEERLKTYAHLFDDKVMKQLKRRRYTGWGRLSRKLINGIRDKQSGKTILDFLKSDGFANRNFMQLIHDDSLTFKEDIQKAQVSGQGDSLHEHIANLAGSPAIKKGILQTVKVVDELVKVMGRHKPENIVIEMARENQTTQKGQKNSRERMKRIEEGIKELGSQILKEHPVENTQLQNEKLYLYYLQNGRDMYVDQELDINRLSDYDVDHIVPQSFLKDDSIDNKVLTRSDKARGKSDNVPSEEVVKKMKNYWRQLLNAKLITQRKFDNLTKAERGGLSELDKAGFIKRQLVETRQITKHVAQILDSRMNTKYDENDKLIREVKVITLKSKLVSDFRKDFQFYKVREINNYHHAHDAYLNAVVGTALIKKYPKLESEFVYGDYKVYDVRKMIAKSEQEIGKATAKYFFYSNIMNFFKTEITLANGEIRKRPLIETNGETGEIVWDKGRDFATVRKVLSMPQVNIVKKTEVQTGGFSKESILPKRNSDKLIARKKDWDPKKYGGFDSPTVAYSVLVVAKVEKGKSKKLKSVKELLGITIMERSSFEKNPIDFLEAKGYKEVKKDLIIKLPKYSLFELENGRKRMLASAGELQKGNELALPSKYVNFLYLASHYEKLKGSPEDNEQKQLFVEQHKHYLDEIIEQISEFSKRVILADANLDKVLSAYNKHRDKPIREQAENIIHLFTLTNLGAPAAFKYFDTTIDRKRYTSTKEVLDATLIHQSITGLYETRIDLSQLGGDGGGGGGGSPAPGGVLNLEEEYRLHEKPVPSSIDPSWLQLFPTVWAERAGMGLANQVPPVVVELRSGASPVAVRQYPMSKEAREGIRPHIQRFLDLGVLVPCQSPWNTPLLPVKKPGTNDYRPVQDLREINKRVQDIHPTVPNPYNLLSSLPPSHTWYSVLDLKDAFFCLKLHPNSQPLFAFEWRDPEKGNTGQLTWTRLPQGFKNSPTLFNEALHRDLAPFRALNPQVVLLQYVDDLLVAAPTYRDCKEGTQKLLQELSKLGYRVSAKKAQLCQKEVTYLGYLLKEGKRWLTPARKATVMKIPPPTTPRQVREFLGKAGFCRLFIPGFASLAAPLYPLTKPSIPFIWTEEHQKAFDRIKEALLSAPALALPDLTKPFTLYVDERAGVARGVLTQTLGPWRRPVAYLSKKLDPVASGWPTCLKAVAAVALLLKDADKLTLGQNVTVIASHSLESIVRQPPDRWMTNARMTHYQSLLLNERVSFAPPAVLNPATLLPVESEATPVHRCSEILAEETGTRRDLKDQPLPGVPAWYTDGSSFIAEGKRRAGAAIVDGKRTVWASSLPEGTSAQKAELVALTQALRLAEGKDINIYTDSRYAFATAHIHGAIYKQRGWLTSAGKDIKNKEEILALLEAIHLPKRVAIIHCPGHQKGNDPVATGNRRADEAAKQAALSTRVLAETTKPAGKRTADGSEFEKRTADGSEFESPKKKAKVE

SEQ ID NO: 7009 - protein, 2096 aa, synthetic construct
MPAAKRVKLDGGDKKYSIGLDIGTNSVGWAVITDEYKVPSKKFKVLGNTDRHSIKKNLIGALLFDSGETAEATRLKRTARRRYTRRKNRICYLQEIFSNEMAKVDDSFFHRLEESFLVEEDKKHERHPIFGNIVDEVAYHEKYPTIYHLRKKLVDSTDKADLRLIYLALAHMIKFRGHFLIEGDLNPDNSDVDKLFIQLVQTYNQLFEENPINASGVDAKAILSARLSKSRRLENLIAQLPGEKKNGLFGNLIALSLGLTPNFKSNFDLAEDAKLQLSKDTYDDDLDNLLAQIGDQYADLFLAAKNLSDAILLSDILRVNTEITKAPLSASMIKRYDEHHQDLTLLKALVRQQLPEKYKEIFFDQSKNGYAGYIDGGASQEEFYKFIKPILEKMDGTEELLVKLNREDLLRKQRTFDNGSIPHQIHLGELHAILRRQEDFYPFLKDNREKIEKILTFRIPYYVGPLARGNSRFAWMTRKSEETITPWNFEEVVDKGASAQSFIERMTNFDKNLPNEKVLPKHSLLYEYFTVYNELTKVKYVTEGMRKPAFLSGEQKKAIVDLLFKTNRKVTVKQLKEDYFKKIECFDSVEISGVEDRFNASLGTYHDLLKIIKDKDFLDNEENEDILEDIVLTLTLFEDREMIEERLKTYAHLFDDKVMKQLKRRRYTGWGRLSRKLINGIRDKQSGKTILDFLKSDGFANRNFMQLIHDDSLTFKEDIQKAQVSGQGDSLHEHIANLAGSPAIKKGILQTVKVVDELVKVMGRHKPENIVIEMARENQTTQKGQKNSRERMKRIEEGIKELGSQILKEHPVENTQLQNEKLYLYYLQNGRDMYVDQELDINRLSDYDVDHIVPQSFLKDDSIDNKVLTRSDKARGKSDNVPSEEVVKKMKNYWRQLLNAKLITQRKFDNLTKAERGGLSELDKAGFIKRQLVETRQITKHVAQILDSRMNTKYDENDKLIREVKVITLKSKLVSDFRKDFQFYKVREINNYHHAHDAYLNAVVGTALIKKYPKLESEFVYGDYKVYDVRKMIAKSEQEIGKATAKYFFYSNIMNFFKTEITLANGEIRKRPLIETNGETGEIVWDKGRDFATVRKVLSMPQVNIVKKTEVQTGGFSKESILPKRNSDKLIARKKDWDPKKYGGFDSPTVAYSVLVVAKVEKGKSKKLKSVKELLGITIMERSSFEKNPIDFLEAKGYKEVKKDLIIKLPKYSLFELENGRKRMLASAGELQKGNELALPSKYVNFLYLASHYEKLKGSPEDNEQKQLFVEQHKHYLDEIIEQISEFSKRVILADANLDKVLSAYNKHRDKPIREQAENIIHLFTLTNLGAPAAFKYFDTTIDRKRYTSTKEVLDATLIHQSITGLYETRIDLSQLGGDGGGGGPAPGGSGGTAPLEEEYRLFLEAPIQNVTLLEQWKREIPKVWAEINPPGLASTQAPIHVQLLSTALPVRVRQYPITLEAKRSLRETIRKFRAAGILRPVHSPWNTPLLPVRKSGTSEYRMVQDLREVNKRVETIHPTVPNPYTLLSLLPPDRIWYSVLDLKDAFFCIPLAPESQLIFAFEWADAEEGESGQLTWTRLPQGFKNSPTLFNEALNRDLQGFRLDHPSVSLLQYVDDLLIAADTQAACLSATRDLLMTLAELGYRVSGKKAQLCQEEVTYLGFKIHKGSRSLSNSRTQAILQIPVPKTKRQVREFLGTIGYCRLWIPGFAELAQPLYAATRPGNDPLVWGEKEEEAFQSLKLALTQPPALALPSLDKPFQLFVEETSGAAKGVLTQALGPWKRPVAYLSKRLDPVAAGWPRCLRAIAAAALLTREASKLTFGQDIEITSSHNLESLLRSPPDKWLTNARITQYQVLLLDPPRVRFKQTAALNPATLLPETDDTLPIHHCLDTLDSLTSTRPDLTDQPLAQAEATLFTDGSSYIRDGKRYAGAAVVTLDSVIWAEPLPIGTSAQKAELIALTKALEWSKDKSVNIYTDSRYAFATLHVHGMIYRERGWLTAGGKAIKNAPEILALLTAVWLPKRVAVMHCKGHQKDDAPTSTGNRRADEVAREVAIRPLSTQATISAGKRTADGSEFEKRTADGSEFESPKKKAKVE

SEQ ID NO: 7010 - protein, 2216 aa, synthetic construct
MPAAKRVKLDGGDKKYSIGLDIGTNSVGWAVITDEYKVPSKKFKVLGNTDRHSIKKNLIGALLFDSGETAEATRLKRTARRRYTRRKNRICYLQEIFSNEMAKVDDSFFHRLEESFLVEEDKKHERHPIFGNIVDEVAYHEKYPTIYHLRKKLVDSTDKADLRLIYLALAHMIKFRGHFLIEGDLNPDNSDVDKLFIQLVQTYNQLFEENPINASGVDAKAILSARLSKSRRLENLIAQLPGEKKNGLFGNLIALSLGLTPNFKSNFDLAEDAKLQLSKDTYDDDLDNLLAQIGDQYADLFLAAKNLSDAILLSDILRVNTEITKAPLSASMIKRYDEHHQDLTLLKALVRQQLPEKYKEIFFDQSKNGYAGYIDGGASQEEFYKFIKPILEKMDGTEELLVKLNREDLLRKQRTFDNGSIPHQIHLGELHAILRRQEDFYPFLKDNREKIEKILTFRIPYYVGPLARGNSRFAWMTRKSEETITPWNFEEVVDKGASAQSFIERMTNFDKNLPNEKVLPKHSLLYEYFTVYNELTKVKYVTEGMRKPAFLSGEQKKAIVDLLFKTNRKVTVKQLKEDYFKKIECFDSVEISGVEDRFNASLGTYHDLLKIIKDKDFLDNEENEDILEDIVLTLTLFEDREMIEERLKTYAHLFDDKVMKQLKRRRYTGWGRLSRKLINGIRDKQSGKTILDFLKSDGFANRNFMQLIHDDSLTFKEDIQKAQVSGQGDSLHEHIANLAGSPAIKKGILQTVKVVDELVKVMGRHKPENIVIEMARENQTTQKGQKNSRERMKRIEEGIKELGSQILKEHPVENTQLQNEKLYLYYLQNGRDMYVDQELDINRLSDYDVDHIVPQSFLKDDSIDNKVLTRSDKARGKSDNVPSEEVVKKMKNYWRQLLNAKLITQRKFDNLTKAERGGLSELDKAGFIKRQLVETRQITKHVAQILDSRMNTKYDENDKLIREVKVITLKSKLVSDFRKDFQFYKVREINNYHHAHDAYLNAVVGTALIKKYPKLESEFVYGDYKVYDVRKMIAKSEQEIGKATAKYFFYSNIMNFFKTEITLANGEIRKRPLIETNGETGEIVWDKGRDFATVRKVLSMPQVNIVKKTEVQTGGFSKESILPKRNSDKLIARKKDWDPKKYGGFDSPTVAYSVLVVAKVEKGKSKKLKSVKELLGITIMERSSFEKNPIDFLEAKGYKEVKKDLIIKLPKYSLFELENGRKRMLASAGELQKGNELALPSKYVNFLYLASHYEKLKGSPEDNEQKQLFVEQHKHYLDEIIEQISEFSKRVILADANLDKVLSAYNKHRDKPIREQAENIIHLFTLTNLGAPAAFKYFDTTIDRKRYTSTKEVLDATLIHQSITGLYETRIDLSQLGGDGGGGGPAPGGSGGTLGDQGSRGSDPLPEPRVTLTVEGIPTEFLVNTGAEHSVLTKPMGKMGSKRTVVAGATGSKVYPWTTKRLLKIGQKQVTHSFLVIPECPAPLLGRDLLTKLKAQIQFSTEGPQVTWEDRPAMCLVLNLEEEYRLHEKPVPPSIDPSWLQLFPMVWAEKAGMGLANQVPPVVVELKSDASPVAVRQYPMSKEAREGIRPHIQRFLDLGILVPCQSPWNTPLLPVKKPGTNDYRPVQDLREVNKRVQDIHPTVPNPYNLLSSLPPSHTWYSVLDLKDAFFCLKLHPNSQPLFAFEWRDPEKGNTGQLTWTRLPQGFKNSPTLFDEALHRDLASFRALNPQVVMLQYVDDLLVAAPTYRDCKEGTRRLLQELSKLGYRVSAKKAQLCREEVTYLGYLLKGGKRWLTPARKATVMKIPTPTTPRQVREFLGTAGFCRLWIPGFASLAAPLYPLTREKVPFTWTEAHQEAFGRIKEALLSAPALALPDLTKPFALYVDEKEGVARGVLTQTLGPWRRPVAYLSKKLDPVASGWPTCLKAIAAVALLLKDADKLTLGQNVLVIAPHNLESIVRQPPDRWMTNARMTHYQSLLLNERVSFAPPAILNPATLLPVESDDTPIHICSEILAEETGTRPDLRDQPLPGVPAWYTDGSSFIMDGRRQAGAAIVDNKRTVWASNLPEGTSAQKAELIALTQALRLAEGKSINIYTDSRYAFATAHVHGAIYKQRGLLTSAGKDIKNKEEILALLEAIHLPKRVAIIHCPGHQRGTDPVATGNRKADEAAKQAAQSTRILTETTKNAGKRTADGSEFEKRTADGSEFESPKKKAKVE

SEQ ID NO: 7011 - protein, 2125 aa, synthetic construct
MPAAKRVKLDGGDKKYSIGLDIGTNSVGWAVITDEYKVPSKKFKVLGNTDRHSIKKNLIGALLFDSGETAEATRLKRTARRRYTRRKNRICYLQEIFSNEMAKVDDSFFHRLEESFLVEEDKKHERHPIFGNIVDEVAYHEKYPTIYHLRKKLVDSTDKADLRLIYLALAHMIKFRGHFLIEGDLNPDNSDVDKLFIQLVQTYNQLFEENPINASGVDAKAILSARLSKSRRLENLIAQLPGEKKNGLFGNLIALSLGLTPNFKSNFDLAEDAKLQLSKDTYDDDLDNLLAQIGDQYADLFLAAKNLSDAILLSDILRVNTEITKAPLSASMIKRYDEHHQDLTLLKALVRQQLPEKYKEIFFDQSKNGYAGYIDGGASQEEFYKFIKPILEKMDGTEELLVKLNREDLLRKQRTFDNGSIPHQIHLGELHAILRRQEDFYPFLKDNREKIEKILTFRIPYYVGPLARGNSRFAWMTRKSEETITPWNFEEVVDKGASAQSFIERMTNFDKNLPNEKVLPKHSLLYEYFTVYNELTKVKYVTEGMRKPAFLSGEQKKAIVDLLFKTNRKVTVKQLKEDYFKKIECFDSVEISGVEDRFNASLGTYHDLLKIIKDKDFLDNEENEDILEDIVLTLTLFEDREMIEERLKTYAHLFDDKVMKQLKRRRYTGWGRLSRKLINGIRDKQSGKTILDFLKSDGFANRNFMQLIHDDSLTFKEDIQKAQVSGQGDSLHEHIANLAGSPAIKKGILQTVKVVDELVKVMGRHKPENIVIEMARENQTTQKGQKNSRERMKRIEEGIKELGSQILKEHPVENTQLQNEKLYLYYLQNGRDMYVDQELDINRLSDYDVDHIVPQSFLKDDSIDNKVLTRSDKARGKSDNVPSEEVVKKMKNYWRQLLNAKLITQRKFDNLTKAERGGLSELDKAGFIKRQLVETRQITKHVAQILDSRMNTKYDENDKLIREVKVITLKSKLVSDFRKDFQFYKVREINNYHHAHDAYLNAVVGTALIKKYPKLESEFVYGDYKVYDVRKMIAKSEQEIGKATAKYFFYSNIMNFFKTEITLANGEIRKRPLIETNGETGEIVWDKGRDFATVRKVLSMPQVNIVKKTEVQTGGFSKESILPKRNSDKLIARKKDWDPKKYGGFDSPTVAYSVLVVAKVEKGKSKKLKSVKELLGITIMERSSFEKNPIDFLEAKGYKEVKKDLIIKLPKYSLFELENGRKRMLASAGELQKGNELALPSKYVNFLYLASHYEKLKGSPEDNEQKQLFVEQHKHYLDEIIEQISEFSKRVILADANLDKVLSAYNKHRDKPIREQAENIIHLFTLTNLGAPAAFKYFDTTIDRKRYTSTKEVLDATLIHQSITGLYETRIDLSQLGGDGGGGGPAPGGSGGLLGRDLLTKLKAQIQFSTEGPQVTWEDRPAMCLVLNLEEEYRLHEKPVPPSIDPSWLQLFPMVWAEKAGMGLANQVPPVVVELKSDASPVAVRQYPMSKEAREGIRPHIQRFLDLGILVPCQSPWNTPLLPVKKPGTNDYRPVQDLREVNKRVQDIHPTVPNPYNLLSSLPPSHTWYSVLDLKDAFFCLKLHPNSQPLFAFEWRDPEKGNTGQLTWTRLPQGFKNSPTLFNEALHRDLASFRALNPQVVMLQYVDDLLVAAPTYRDCKEGTRRLLQELSKLGYRVSAKKAQLCREEVTYLGYLLKGGKRWLTPARKATVMKIPTPTTPRQVREFLGTAGFCRLWIPGFASLAAPLYPLTRPKVPFTWTEAHQEAFGRIKEALLSAPALALPDLTKPFALYVDEKEGVARGVLTQTLGPWRRPVAYLSKKLDPVASGWPTCLKAIAAVALLLKDADKLTLGQNVLVIAPHNLESIVRQPPDRWMTNARMTHYQSLLLNERVSFAPPAILNPATLLPVESDDTPIHICSEILAEETGTRPDLRDQPLPGVPAWYTDGSSFIMDGRRQAGAAIVDNKRTVWASNLPEGTSAQKAELIALTQALRLAEGKSINIYTDSRYAFATAHVHGAIYKQRGWLTSAGKDIKNKEEILALLEAIHLPKRVAIIHCPGHQRGTDPVATGNRKADEAAKQAAQSTRILTETTKNAGKRTADGSEFEKRTADGSEFESPKKKAKVE

SEQ ID NO: 7012 - protein, 2094 aa, synthetic construct
MPAAKRVKLDGGDKKYSIGLDIGTNSVGWAVITDEYKVPSKKFKVLGNTDRHSIKKNLIGALLFDSGETAEATRLKRTARRRYTRRKNRICYLQEIFSNEMAKVDDSFFHRLEESFLVEEDKKHERHPIFGNIVDEVAYHEKYPTIYHLRKKLVDSTDKADLRLIYLALAHMIKFRGHFLIEGDLNPDNSDVDKLFIQLVQTYNQLFEENPINASGVDAKAILSARLSKSRRLENLIAQLPGEKKNGLFGNLIALSLGLTPNFKSNFDLAEDAKLQLSKDTYDDDLDNLLAQIGDQYADLFLAAKNLSDAILLSDILRVNTEITKAPLSASMIKRYDEHHQDLTLLKALVRQQLPEKYKEIFFDQSKNGYAGYIDGGASQEEFYKFIKPILEKMDGTEELLVKLNREDLLRKQRTFDNGSIPHQIHLGELHAILRRQEDFYPFLKDNREKIEKILTFRIPYYVGPLARGNSRFAWMTRKSEETITPWNFEEVVDKGASAQSFIERMTNFDKNLPNEKVLPKHSLLYEYFTVYNELTKVKYVTEGMRKPAFLSGEQKKAIVDLLFKTNRKVTVKQLKEDYFKKIECFDSVEISGVEDRFNASLGTYHDLLKIIKDKDFLDNEENEDILEDIVLTLTLFEDREMIEERLKTYAHLFDDKVMKQLKRRRYTGWGRLSRKLINGIRDKQSGKTILDFLKSDGFANRNFMQLIHDDSLTFKEDIQKAQVSGQGDSLHEHIANLAGSPAIKKGILQTVKVVDELVKVMGRHKPENIVIEMARENQTTQKGQKNSRERMKRIEEGIKELGSQILKEHPVENTQLQNEKLYLYYLQNGRDMYVDQELDINRLSDYDVDHIVPQSFLKDDSIDNKVLTRSDKARGKSDNVPSEEVVKKMKNYWRQLLNAKLITQRKFDNLTKAERGGLSELDKAGFIKRQLVETRQITKHVAQILDSRMNTKYDENDKLIREVKVITLKSKLVSDFRKDFQFYKVREINNYHHAHDAYLNAVVGTALIKKYPKLESEFVYGDYKVYDVRKMIAKSEQEIGKATAKYFFYSNIMNFFKTEITLANGEIRKRPLIETNGETGEIVWDKGRDFATVRKVLSMPQVNIVKKTEVQTGGFSKESILPKRNSDKLIARKKDWDPKKYGGFDSPTVAYSVLVVAKVEKGKSKKLKSVKELLGITIMERSSFEKNPIDFLEAKGYKEVKKDLIIKLPKYSLFELENGRKRMLASAGELQKGNELALPSKYVNFLYLASHYEKLKGSPEDNEQKQLFVEQHKHYLDEIIEQISEFSKRVILADANLDKVLSAYNKHRDKPIREQAENIIHLFTLTNLGAPAAFKYFDTTIDRKRYTSTKEVLDATLIHQSITGLYETRIDLSQLGGDGGGGGPAPGGSGGTLGIEDEYRLHETSTEPDVSLGSTWLSDFPQAWAETGGMGLAVRQAPLIIPLKATSTPVSIQQYPMSHEARLGIKPHIQRLLDQGILVPCQSPWNTPLLPVKKPGTNDYRPVQDLREVNKRVEDIHPTVPNPYNLLSGLPPSHQWYTVLDLKDAFFCLRLHPTSQPLFAFEWRDPGMGISGQLTWTRLPQGFKNSPTLFNEALHRDLADFRIQHPDLILLQYVDDILLAATSELDCQQGTRALLQTLGDLGYRASAKKAQICQKQVKYLGYLLREGQRWLTEARKETVMGQPVPKTPRQLREFLGTAGFCRLWIPGFAEMAAPLYPLTKPGTLFSWGPDQQKAYQEIKQALLTAPALGLPDLTKPFELFVDEKQGYAKGVLTQKLGPWRRPVAYLSKKLDPVAAGWPPCLRMVAAIAVLTKDAGKLTMGQPLVILAPHAVEALVKQPPDRWLSNARMTHYQAMLLDTDRVQFGPVVALNPATLLPLPEEGAPHDCLEILAETHGTRPDLTDQPIPDADHTWYTDGSSFLQEGQRKAGAAVTTETEVIWAGALPAGTSAQRAELIALTQALKMAEGKRLNVYTDSRYAFATAHIHGEIYRRRGWLTSEGREIKNKSEILALLKALFLPKRLSIIHCLGHQKGDSAEARGNRLADQAAREAAIKTPPDTSTLLAGKRTADGSEFEKRTADGSEFESPKKKAKVE

SEQ ID NO: 7013 - protein, 2086 aa, synthetic construct
MPAAKRVKLDGGDKKYSIGLDIGTNSVGWAVITDEYKVPSKKFKVLGNTDRHSIKKNLIGALLFDSGETAEATRLKRTARRRYTRRKNRICYLQEIFSNEMAKVDDSFFHRLEESFLVEEDKKHERHPIFGNIVDEVAYHEKYPTIYHLRKKLVDSTDKADLRLIYLALAHMIKFRGHFLIEGDLNPDNSDVDKLFIQLVQTYNQLFEENPINASGVDAKAILSARLSKSRRLENLIAQLPGEKKNGLFGNLIALSLGLTPNFKSNFDLAEDAKLQLSKDTYDDDLDNLLAQIGDQYADLFLAAKNLSDAILLSDILRVNTEITKAPLSASMIKRYDEHHQDLTLLKALVRQQLPEKYKEIFFDQSKNGYAGYIDGGASQEEFYKFIKPILEKMDGTEELLVKLNREDLLRKQRTFDNGSIPHQIHLGELHAILRRQEDFYPFLKDNREKIEKILTFRIPYYVGPLARGNSRFAWMTRKSEETITPWNFEEVVDKGASAQSFIERMTNFDKNLPNEKVLPKHSLLYEYFTVYNELTKVKYVTEGMRKPAFLSGEQKKAIVDLLFKTNRKVTVKQLKEDYFKKIECFDSVEISGVEDRFNASLGTYHDLLKIIKDKDFLDNEENEDILEDIVLTLTLFEDREMIEERLKTYAHLFDDKVMKQLKRRRYTGWGRLSRKLINGIRDKQSGKTILDFLKSDGFANRNFMQLIHDDSLTFKEDIQKAQVSGQGDSLHEHIANLAGSPAIKKGILQTVKVVDELVKVMGRHKPENIVIEMARENQTTQKGQKNSRERMKRIEEGIKELGSQILKEHPVENTQLQNEKLYLYYLQNGRDMYVDQELDINRLSDYDVDHIVPQSFLKDDSIDNKVLTRSDKARGKSDNVPSEEVVKKMKNYWRQLLNAKLITQRKFDNLTKAERGGLSELDKAGFIKRQLVETRQITKHVAQILDSRMNTKYDENDKLIREVKVITLKSKLVSDFRKDFQFYKVREINNYHHAHDAYLNAVVGTALIKKYPKLESEFVYGDYKVYDVRKMIAKSEQEIGKATAKYFFYSNIMNFFKTEITLANGEIRKRPLIETNGETGEIVWDKGRDFATVRKVLSMPQVNIVKKTEVQTGGFSKESILPKRNSDKLIARKKDWDPKKYGGFDSPTVAYSVLVVAKVEKGKSKKLKSVKELLGITIMERSSFEKNPIDFLEAKGYKEVKKDLIIKLPKYSLFELENGRKRMLASAGELQKGNELALPSKYVNFLYLASHYEKLKGSPEDNEQKQLFVEQHKHYLDEIIEQISEFSKRVILADANLDKVLSAYNKHRDKPIREQAENIIHLFTLTNLGAPAAFKYFDTTIDRKRYTSTKEVLDATLIHQSITGLYETRIDLSQLGGDGGGGGPAPGGSGGLDDEYRLYSPLVKPDQNIQFWLEQFPQAWAETAGMGLAKQVPPQVIQLKASATPVSVRQYPLSKEAQEGIRPHVQRLIQQGILVPVQSPWNTPLLPVRKPGTNDYRPVQDLREVNKRVQDIHPTVPNPYNLLCALPPQRSWYTVLDLKDAFFCLRLHPTSQPLFAFEWRDPGTGRTGQLTWTRLPQGFKNSPTIFNEALHRDLANFRIQHPQVTLLQYVDDLLLAGATKQDCLEGTKALLLELSDLGYRASAKKAQICRREVTYLGYSLRDGQRWLTEARKKTVVQIPAPTTAKQVREFLGKAGFCRLFIPGFATLAAPLYPLTKPKGEFSWAPEHQKAFDAIKKALLSAPALALPDVTKPFTLYVDERKGVARGVLTQTLGPWRRPVAYLSKKLDPVASGWPVCLKAIAAVAILVKDADKLTLGQNITVIAPHALENIVRQPPDRWMTNARMTHYQSLLLTERVTFAPPAALNPATLLPEETDEPVTHDCHQLLIEETGVRKDLTDIPLTGEVLTWFTDGSSYVVEGKRMAGAAVVDGTRTIWASSLPEGTSAQKAELMALTQALRLAEGKSINIYTDSRYAFATAHVHGAIYKQRGWLTSAGREIKNKEEILSLLEALHLPKRLAIIHCPGHQKAKDPISRGNQMADRVAKQAAQGVNLLPAGKRTADGSEFEKRTADGSEFESPKKKAKVE

SEQ ID NO: 7014 - protein, 2088 aa, synthetic construct
MPAAKRVKLDGGDKKYSIGLDIGTNSVGWAVITDEYKVPSKKFKVLGNTDRHSIKKNLIGALLFDSGETAEATRLKRTARRRYTRRKNRICYLQEIFSNEMAKVDDSFFHRLEESFLVEEDKKHERHPIFGNIVDEVAYHEKYPTIYHLRKKLVDSTDKADLRLIYLALAHMIKFRGHFLIEGDLNPDNSDVDKLFIQLVQTYNQLFEENPINASGVDAKAILSARLSKSRRLENLIAQLPGEKKNGLFGNLIALSLGLTPNFKSNFDLAEDAKLQLSKDTYDDDLDNLLAQIGDQYADLFLAAKNLSDAILLSDILRVNTEITKAPLSASMIKRYDEHHQDLTLLKALVRQQLPEKYKEIFFDQSKNGYAGYIDGGASQEEFYKFIKPILEKMDGTEELLVKLNREDLLRKQRTFDNGSIPHQIHLGELHAILRRQEDFYPFLKDNREKIEKILTFRIPYYVGPLARGNSRFAWMTRKSEETITPWNFEEVVDKGASAQSFIERMTNFDKNLPNEKVLPKHSLLYEYFTVYNELTKVKYVTEGMRKPAFLSGEQKKAIVDLLFKTNRKVTVKQLKEDYFKKIECFDSVEISGVEDRFNASLGTYHDLLKIIKDKDFLDNEENEDILEDIVLTLTLFEDREMIEERLKTYAHLFDDKVMKQLKRRRYTGWGRLSRKLINGIRDKQSGKTILDFLKSDGFANRNFMQLIHDDSLTFKEDIQKAQVSGQGDSLHEHIANLAGSPAIKKGILQTVKVVDELVKVMGRHKPENIVIEMARENQTTQKGQKNSRERMKRIEEGIKELGSQILKEHPVENTQLQNEKLYLYYLQNGRDMYVDQELDINRLSDYDVDHIVPQSFLKDDSIDNKVLTRSDKARGKSDNVPSEEVVKKMKNYWRQLLNAKLITQRKFDNLTKAERGGLSELDKAGFIKRQLVETRQITKHVAQILDSRMNTKYDENDKLIREVKVITLKSKLVSDFRKDFQFYKVREINNYHHAHDAYLNAVVGTALIKKYPKLESEFVYGDYKVYDVRKMIAKSEQEIGKATAKYFFYSNIMNFFKTEITLANGEIRKRPLIETNGETGEIVWDKGRDFATVRKVLSMPQVNIVKKTEVQTGGFSKESILPKRNSDKLIARKKDWDPKKYGGFDSPTVAYSVLVVAKVEKGKSKKLKSVKELLGITIMERSSFEKNPIDFLEAKGYKEVKKDLIIKLPKYSLFELENGRKRMLASAGELQKGNELALPSKYVNFLYLASHYEKLKGSPEDNEQKQLFVEQHKHYLDEIIEQISEFSKRVILADANLDKVLSAYNKHRDKPIREQAENIIHLFTLTNLGAPAAFKYFDTTIDRKRYTSTKEVLDATLIHQSITGLYETRIDLSQLGGDGGGGGPAPGGSGGTLQLDDEYRLYSPLVKPDQNIQFWLEQFPQAWAETAGMGLAKQVPPQVIQLKASATPVSVRQYPLSKEAQEGIRPHVQRLIQQGILVPVQSPWNTPLLPVRKPGTNDYRPVQDLREVNKRVQDIHPTVPNPYNLLCALPPQRSWYTVLDLKDAFFCLRLHPTSQPLFAFEWRDPGTGRTGQLTWTRLPQGFKNSPTIFDEALHRDLANFRIQHPQVTLLQYVDDLLLAGATKQDCLEGTKALLLELSDLGYRASAKKAQICRREVTYLGYSLRDGQRWLTEARKKTVVQIPAPTTAKQVREFLGTAGFCRLWIPGFATLAAPLYPLTKEKGEFSWAPEHQKAFDAIKKALLSAPALALPDVTKPFTLYVDERKGVARGVLTQTLGPWRRPVAYLSKKLDPVASGWPVCLKAIAAVAILVKDADKLTLGQNITVIAPHALENIVRQPPDRWMTNARMTHYQSLLLTERVTFAPPAALNPATLLPEETDEPVTHDCHQLLIEETGVRKDLTDIPLTGEVLTWFTDGSSYVVEGKRMAGAAVVDGTRTIWASSLPEGTSAQKAELMALTQALRLAEGKSINIYTDSRYAFATAHVHGAIYKQRGLLTSAGREIKNKEEILSLLEALHLPKRLAIIHCPGHQKAKDPISRGNQMADRVAKQAAQGVNLLAGKRTADGSEFEKRTADGSEFESPKKKAKVE

SEQ ID NO: 7015 - protein, 2086 aa, synthetic construct; identical to SEQ ID NO: 7013

SEQ ID NO: 7016 - protein, 2085 aa, synthetic construct
MPAAKRVKLDGGDKKYSIGLDIGTNSVGWAVITDEYKVPSKKFKVLGNTDRHSIKKNLIGALLFDSGETAEATRLKRTARRRYTRRKNRICYLQEIFSNEMAKVDDSFFHRLEESFLVEEDKKHERHPIFGNIVDEVAYHEKYPTIYHLRKKLVDSTDKADLRLIYLALAHMIKFRGHFLIEGDLNPDNSDVDKLFIQLVQTYNQLFEENPINASGVDAKAILSARLSKSRRLENLIAQLPGEKKNGLFGNLIALSLGLTPNFKSNFDLAEDAKLQLSKDTYDDDLDNLLAQIGDQYADLFLAAKNLSDAILLSDILRVNTEITKAPLSASMIKRYDEHHQDLTLLKALVRQQLPEKYKEIFFDQSKNGYAGYIDGGASQEEFYKFIKPILEKMDGTEELLVKLNREDLLRKQRTFDNGSIPHQIHLGELHAILRRQEDFYPFLKDNREKIEKILTFRIPYYVGPLARGNSRFAWMTRKSEETITPWNFEEVVDKGASAQSFIERMTNFDKNLPNEKVLPKHSLLYEYFTVYNELTKVKYVTEGMRKPAFLSGEQKKAIVDLLFKTNRKVTVKQLKEDYFKKIECFDSVEISGVEDRFNASLGTYHDLLKIIKDKDFLDNEENEDILEDIVLTLTLFEDREMIEERLKTYAHLFDDKVMKQLKRRRYTGWGRLSRKLINGIRDKQSGKTILDFLKSDGFANRNFMQLIHDDSLTFKEDIQKAQVSGQGDSLHEHIANLAGSPAIKKGILQTVKVVDELVKVMGRHKPENIVIEMARENQTTQKGQKNSRERMKRIEEGIKELGSQILKEHPVENTQLQNEKLYLYYLQNGRDMYVDQELDINRLSDYDVDHIVPQSFLKDDSIDNKVLTRSDKARGKSDNVPSEEVVKKMKNYWRQLLNAKLITQRKFDNLTKAERGGLSELDKAGFIKRQLVETRQITKHVAQILDSRMNTKYDENDKLIREVKVITLKSKLVSDFRKDFQFYKVREINNYHHAHDAYLNAVVGTALIKKYPKLESEFVYGDYKVYDVRKMIAKSEQEIGKATAKYFFYSNIMNFFKTEITLANGEIRKRPLIETNGETGEIVWDKGRDFATVRKVLSMPQVNIVKKTEVQTGGFSKESILPKRNSDKLIARKKDWDPKKYGGFDSPTVAYSVLVVAKVEKGKSKKLKSVKELLGITIMERSSFEKNPIDFLEAKGYKEVKKDLIIKLPKYSLFELENGRKRMLASAGELQKGNELALPSKYVNFLYLASHYEKLKGSPEDNEQKQLFVEQHKHYLDEIIEQISEFSKRVILADANLDKVLSAYNKHRDKPIREQAENIIHLFTLTNLGAPAAFKYFDTTIDRKRYTSTKEVLDATLIHQSITGLYETRIDLSQLGGDGGGGGPAPGGSGGIPWLMKKPLQLTTLVPLQEYEERLLKQTMLTGSYKEKLQSLFLKYDALWQHWENQVGHRRIKPHHIATGTVNPRPQKQYPINPKAKASIQTVINDLLKQGVLIQQNSIMNTPVYPVPKPDGKWRMVLDYREVNKTIPLIAAQNQHSAGILSSIFRGKYKTTLDLSNGFWAHSITPESYWLTAFTWLGQQYCWTRLPQGFLNSPALFNADVVDLLKEVPNVQVYVDDIYISHDDPREHLEQLEKVFSLLLNAGYVVSLKKSEIAQHEVEFLGFNITKEGRGLTETFKQKLLNITPPRDLKQLQSILGLLNFARNFIPNFSELVKPLYNIIATAPGKYITWTTDNSQQLQNIISMLNSAENLEERNPEVRLIMKVNTSPSAGYIRFYNEFAKRPIMYLNYVYTKAEVKFTNTEKLLTTIHKGLIKALDLGMGQEILVYSPIVSMTKIQKTPLPERKALPIRWITWMSYLEDPRIQFHYDKTLPELQQVPTVTDDIIAKIKHPSEFSMVFYTDGSAIKHPNVNKSHNAGMGIAQVQFKPEFTVINTWSIPLGDHTAQLAEVAAVEFACKKALKIDGPVLIVTDSFYVAESVNKELPYWQSNGFFNNKKKPLKHVSKWKSIADCIQLKPDIIIIHEKGHQPTASTFHTEGNNLADKLATQGSYVVNAGKRTADGSEFEKRTADGSEFESPKKKAKVE

SEQ ID NO: 7017 - protein, 2092 aa, synthetic construct
MPAAKRVKLDGGDKKYSIGLDIGTNSVGWAVITDEYKVPSKKFKVLGNTDRHSIKKNLIGALLFDSGETAEATRLKRTARRRYTRRKNRICYLQEIFSNEMAKVDDSFFHRLEESFLVEEDKKHERHPIFGNIVDEVAYHEKYPTIYHLRKKLVDSTDKADLRLIYLALAHMIKFRGHFLIEGDLNPDNSDVDKLFIQLVQTYNQLFEENPINASGVDAKAILSARLSKSRRLENLIAQLPGEKKNGLFGNLIALSLGLTPNFKSNFDLAEDAKLQLSKDTYDDDLDNLLAQIGDQYADLFLAAKNLSDAILLSDILRVNTEITKAPLSASMIKRYDEHHQDLTLLKALVRQQLPEKYKEIFFDQSKNGYAGYIDGGASQEEFYKFIKPILEKMDGTEELLVKLNREDLLRKQRTFDNGSIPHQIHLGELHAILRRQEDFYPFLKDNREKIEKILTFRIPYYVGPLARGNSRFAWMTRKSEETITPWNFEEVVDKGASAQSFIERMTNFDKNLPNEKVLPKHSLLYEYFTVYNELTKVKYVTEGMRKPAFLSGEQKKAIVDLLFKTNRKVTVKQLKEDYFKKIECFDSVEISGVEDRFNASLGTYHDLLKIIKDKDFLDNEENEDILEDIVLTLTLFEDREMIEERLKTYAHLFDDKVMKQLKRRRYTGWGRLSRKLINGIRDKQSGKTILDFLKSDGFANRNFMQLIHDDSLTFKEDIQKAQVSGQGDSLHEHIANLAGSPAIKKGILQTVKVVDELVKVMGRHKPENIVIEMARENQTTQKGQKNSRERMKRIEEGIKELGSQILKEHPVENTQLQNEKLYLYYLQNGRDMYVDQELDINRLSDYDVDHIVPQSFLKDDSIDNKVLTRSDKARGKSDNVPSEEVVKKMKNYWRQLLNAKLITQRKFDNLTKAERGGLSELDKAGFIKRQLVETRQITKHVAQILDSRMNTKYDENDKLIREVKVITLKSKLVSDFRKDFQFYKVREINNYHHAHDAYLNAVVGTALIKKYPKLESEFVYGDYKVYDVRKMIAKSEQEIGKATAKYFFYSNIMNFFKTEITLANGEIRKRPLIETNGETGEIVWDKGRDFATVRKVLSMPQVNIVKKTEVQTGGFSKESILPKRNSDKLIARKKDWDPKKYGGFDSPTVAYSVLVVAKVEKGKSKKLKSVKELLGITIMERSSFEKNPIDFLEAKGYKEVKKDLIIKLPKYSLFELENGRKRMLASAGELQKGNELALPSKYVNFLYLASHYEKLKGSPEDNEQKQLFVEQHKHYLDEIIEQISEFSKRVILADANLDKVLSAYNKHRDKPIREQAENIIHLFTLTNLGAPAAFKYFDTTIDRKRYTSTKEVLDATLIHQSITGLYETRIDLSQLGGDGGGGGPAPGGSGGVLNLEEEYRLHEKPVPSSIDPSWLQLFPTVWAERAGMGLANQVPPVVVELRSGASPVAVRQYPMSKEAREGIRPHIQRFLDLGVLVPCQSPWNTPLLPVKKPGTNDYRPVQDLREINKRVQDIHPTVPNPYNLLSSLPPSHTWYSVLDLKDAFFCLKLHPNSQPLFAFEWRDPEKGNTGQLTWTRLPQGFKNSPTLFNEALHRDLAPFRALNPQVVLLQYVDDLLVAAPTYRDCKEGTQKLLQELSKLGYRVSAKKAQLCQKEVTYLGYLLKEGKRWLTPARKATVMKIPPPTTPRQVREFLGTAGFCRLWIPGFASLAAPLYPLTKPSIPFIWTEEHQKAFDRIKEALLSAPALALPDLTKPFTLYVDERAGVARGVLTQTLGPWRRPVAYLSKKLDPVASGWPTCLKAVAAVALLLKDADKLTLGQNVTVIASHSLESIVRQPPDRWMTNARMTHYQSLLLNERVSFAPPAVLNPATLLPVESEATPVHRCSEILAEETGTRRDLKDQPLPGVPAWYTDGSSFIAEGKRRAGAAIVDGKRTVWASSLPEGTSAQKAELVALTQALRLAEGKDINIYTDSRYAFATAHIHGAIYKQRGWLTSAGKDIKNKEEILALLEAIHLPKRVAIIHCPGHQKGNDPVATGNRRADEAAKQAALSTRVLAETTKPAGKRTADGSEFEKRTADGSEFESPKKKAKVE

SEQ ID NO: 7018 - protein, 2096 aa, synthetic construct
MPAAKRVKLDGGDKKYSIGLDIGTNSVGWAVITDEYKVPSKKFKVLGNTDRHSIKKNLIGALLFDSGETAEATRLKRTARRRYTRRKNRICYLQEIFSNEMAKVDDSFFHRLEESFLVEEDKKHERHPIFGNIVDEVAYHEKYPTIYHLRKKLVDSTDKADLRLIYLALAHMIKFRGHFLIEGDLNPDNSDVDKLFIQLVQTYNQLFEENPINASGVDAKAILSARLSKSRRLENLIAQLPGEKKNGLFGNLIALSLGLTPNFKSNFDLAEDAKLQLSKDTYDDDLDNLLAQIGDQYADLFLAAKNLSDAILLSDILRVNTEITKAPLSASMIKRYDEHHQDLTLLKALVRQQLPEKYKEIFFDQSKNGYAGYIDGGASQEEFYKFIKPILEKMDGTEELLVKLNREDLLRKQRTFDNGSIPHQIHLGELHAILRRQEDFYPFLKDNREKIEKILTFRIPYYVGPLARGNSRFAWMTRKSEETITPWNFEEVVDKGASAQSFIERMTNFDKNLPNEKVLPKHSLLYEYFTVYNELTKVKYVTEGMRKPAFLSGEQKKAIVDLLFKTNRKVTVKQLKEDYFKKIECFDSVEISGVEDRFNASLGTYHDLLKIIKDKDFLDNEENEDILEDIVLTLTLFEDREMIEERLKTYAHLFDDKVMKQLKRRRYTGWGRLSRKLINGIRDKQSGKTILDFLKSDGFANRNFMQLIHDDSLTFKEDIQKAQVSGQGDSLHEHIANLAGSPAIKKGILQTVKVVDELVKVMGRHKPENIVIEMARENQTTQKGQKNSRERMKRIEEGIKELGSQILKEHPVENTQLQNEKLYLYYLQNGRDMYVDQELDINRLSDYDVDHIVPQSFLKDDSIDNKVLTRSDKARGKSDNVPSEEVVKKMKNYWRQLLNAKLITQRKFDNLTKAERGGLSELDKAGFIKRQLVETRQITKHVAQILDSRMNTKYDENDKLIREVKVITLKSKLVSDFRKDFQFYKVREINNYHHAHDAYLNAVVGTALIKKYPKLESEFVYGDYKVYDVRKMIAKSEQEIGKATAKYFFYSNIMNFFKTEITLANGEIRKRPLIETNGETGEIVWDKGRDFATVRKVLSMPQVNIVKKTEVQTGGFSKESILPKRNSDKLIARKKDWDPKKYGGFDSPTVAYSVLVVAKVEKGKSKKLKSVKELLGITIMERSSFEKNPIDFLEAKGYKEVKKDLIIKLPKYSLFELENGRKRMLASAGELQKGNELALPSKYVNFLYLASHYEKLKGSPEDNEQKQLFVEQHKHYLDEIIEQISEFSKRVILADANLDKVLSAYNKHRDKPIREQAENIIHLFTLTNLGAPAAFKYFDTTIDRKRYTSTKEVLDATLIHQSITGLYETRIDLSQLGGDGGPAPGGSGGGGGTAPLEEEYRLFLEAPIQNVTLLEQWKREIPKVWAEINPPGLASTQAPIHVQLLSTALPVRVRQYPITLEAKRSLRETIRKFRAAGILRPVHSPWNTPLLPVRKSGTSEYRMVQDLREVNKRVETIHPTVPNPYTLLSLLPPDRIWYSVLDLKDAFFCIPLAPESQLIFAFEWADAEEGESGQLTWTRLPQGFKNSPTLFNEALNRDLQGFRLDHPSVSLLQYVDDLLIAADTQAACLSATRDLLMTLAELGYRVSGKKAQLCQEEVTYLGFKIHKGSRSLSNSRTQAILQIPVPKTKRQVREFLGTIGYCRLWIPGFAELAQPLYAATRPGNDPLVWGEKEEEAFQSLKLALTQPPALALPSLDKPFQLFVEETSGAAKGVLTQALGPWKRPVAYLSKRLDPVAAGWPRCLRAIAAAALLTREASKLTFGQDIEITSSHNLESLLRSPPDKWLTNARITQYQVLLLDPPRVRFKQTAALNPATLLPETDDTLPIHHCLDTLDSLTSTRPDLTDQPLAQAEATLFTDGSSYIRDGKRYAGAAVVTLDSVIWAEPLPIGTSAQKAELIALTKALEWSKDKSVNIYTDSRYAFATLHVHGMIYRERGWLTAGGKAIKNAPEILALLTAVWLPKRVAVMHCKGHQKDDAPTSTGNRRADEVAREVAIRPLSTQATISAGKRTADGSEFEKRTADGSEFESPKKKAKVE

SEQ ID NO: 7019 - protein, 2092 aa, synthetic construct
MPAAKRVKLDGGDKKYSIGLDIGTNSVGWAVITDEYKVPSKKFKVLGNTDRHSIKKNLIGALLFDSGETAEATRLKRTARRRYTRRKNRICYLQEIFSNEMAKVDDSFFHRLEESFLVEEDKKHERHPIFGNIVDEVAYHEKYPTIYHLRKKLVDSTDKADLRLIYLALAHMIKFRGHFLIEGDLNPDNSDVDKLFIQLVQTYNQLFEENPINASGVDAKAILSARLSKSRRLENLIAQLPGEKKNGLFGNLIALSLGLTPNFKSNFDLAEDAKLQLSKDTYDDDLDNLLAQIGDQYADLFLAAKNLSDAILLSDILRVNTEITKAPLSASMIKRYDEHHQDLTLLKALVRQQLPEKYKEIFFDQSKNGYAGYIDGGASQEEFYKFIKPILEKMDGTEELLVKLNREDLLRKQRTFDNGSIPHQIHLGELHAILRRQEDFYPFLKDNREKIEKILTFRIPYYVGPLARGNSRFAWMTRKSEETITPWNFEEVVDKGASAQSFIERMTNFDKNLPNEKVLPKHSLLYEYFTVYNELTKVKYVTEGMRKPAFLSGEQKKAIVDLLFKTNRKVTVKQLKEDYFKKIECFDSVEISGVEDRFNASLGTYHDLLKIIKDKDFLDNEENEDILEDIVLTLTLFEDREMIEERLKTYAHLFDDKVMKQLKRRRYTGWGRLSRKLINGIRDKQSGKTILDFLKSDGFANRNFMQLIHDDSLTFKEDIQKAQVSGQGDSLHEHIANLAGSPAIKKGILQTVKVVDELVKVMGRHKPENIVIEMARENQTTQKGQKNSRERMKRIEEGIKELGSQILKEHPVENTQLQNEKLYLYYLQNGRDMYVDQELDINRLSDYDVDHIVPQSFLKDDSIDNKVLTRSDKARGKSDNVPSEEVVKKMKNYWRQLLNAKLITQRKFDNLTKAERGGLSELDKAGFIKRQLVETRQITKHVAQILDSRMNTKYDENDKLIREVKVITLKSKLVSDFRKDFQFYKVREINNYHHAHDAYLNAVVGTALIKKYPKLESEFVYGDYKVYDVRKMIAKSEQEIGKATAKYFFYSNIMNFFKTEITLANGEIRKRPLIETNGETGEIVWDKGRDFATVRKVLSMPQVNIVKKTEVQTGGFSKESILPKRNSDKLIARKKDWDPKKYGGFDSPTVAYSVLVVAKVEKGKSKKLKSVKELLGITIMERSSFEKNPIDFLEAKGYKEVKKDLIIKLPKYSLFELENGRKRMLASAGELQKGNELALPSKYVNFLYLASHYEKLKGSPEDNEQKQLFVEQHKHYLDEIIEQISEFSKRVILADANLDKVLSAYNKHRDKPIREQAENIIHLFTLTNLGAPAAFKYFDTTIDRKRYTSTKEVLDATLIHQSITGLYETRIDLSQLGGDGGPAPGGSGGGGGVLNLEEEYRLHEKPVPSSIDPSWLQLFPTVWAERAGMGLANQVPPVVVELRSGASPVAVRQYPMSKEAREGIRPHIQKFLDLGVLVPCRSPWNTPLLPVKKPGTNDYRPVQDLREINKRVQDIHPTVPNPYNLLSSLPPSYTWYSVLDLKDAFFCLRLHPNSQPLFAFEWKDPEKGNTGQLTWTRLPQGFKNSPTLFNEALHRDLAPFRALNPQVVLLQYVDDLLVAAPTYEDCKKGTQKLLQELSKLGYRVSAKKAQLCQREVTYLGYLLKEGKRWLTPARKATVMKIPVPTTPRQVREFLGKAGFCRLFIPGFASLAAPLYPLTKPSIPFIWTEEHQQAFDHIKKALLSAPALALPDLTKPFTLYIDERAGVARGVLTQTLGPWRRPVAYLSKKLDPVASGWPTCLKAVAAVALLLKDADKLTLGQNVTVIASHSLESIVRQPPDRWMTNARMTHYQSLLLNERVSFAPPAVLNPATLLPVESEATPVHRCSEILAEETGTRRDLEDQPLPGVPTWYTDGSSFITEGKRRAGAPIVDGKRTVWASSLPEGTSAQKAELVALTQALRLAEGKNINIYTDSRYAFATAHIHGAIYKQRGWLTSAGKDIKNKEEILALLEAIHLPRRVAIIHCPGHQRGSNPVATGNRRADEAAKQAALSTRVLAGTTKPAGKRTADGSEFEKRTADGSEFESPKKKAKVE

SEQ ID NO: 7020 - protein, 2094 aa, synthetic construct
MPAAKRVKLDGGDKKYSIGLDIGTNSVGWAVITDEYKVPSKKFKVLGNTDRHSIKKNLIGALLFDSGETAEATRLKRTARRRYTRRKNRICYLQEIFSNEMAKVDDSFFHRLEESFLVEEDKKHERHPIFGNIVDEVAYHEKYPTIYHLRKKLVDSTDKADLRLIYLALAHMIKFRGHFLIEGDLNPDNSDVDKLFIQLVQTYNQLFEENPINASGVDAKAILSARLSKSRRLENLIAQLPGEKKNGLFGNLIALSLGLTPNFKSNFDLAEDAKLQLSKDTYDDDLDNLLAQIGDQYADLFLAAKNLSDAILLSDILRVNTEITKAPLSASMIKRYDEHHQDLTLLKALVRQQLPEKYKEIFFDQSKNGYAGYIDGGASQEEFYKFIKPILEKMDGTEELLVKLNREDLLRKQRTFDNGSIPHQIHLGELHAILRRQEDFYPFLKDNREKIEKILTFRIPYYVGPLARGNSRFAWMTRKSEETITPWNFEEVVDKGASAQSFIERMTNFDKNLPNEKVLPKHSLLYEYFTVYNELTKVKYVTEGMRKPAFLSGEQKKAIVDLLFKTNRKVTVKQLKEDYFKKIECFDSVEISGVEDRFNASLGTYHDLLKIIKDKDFLDNEENEDILEDIVLTLTLFEDREMIEERLKTYAHLFDDKVMKQLKRRRYTGWGRLSRKLINGIRDKQSGKTILDFLKSDGFANRNFMQLIHDDSLTFKEDIQKAQVSGQGDSLHEHIANLAGSPAIKKGILQTVKVVDELVKVMGRHKPENIVIEMARENQTTQKGQKNSRERMKRIEEGIKELGSQILKEHPVENTQLQNEKLYLYYLQNGRDMYVDQELDINRLSDYDVDHIVPQSFLKDDSIDNKVLTRSDKARGKSDNVPSEEVVKKMKNYWRQLLNAKLITQRKFDNLTKAERGGLSELDKAGFIKRQLVETRQITKHVAQILDSRMNTKYDENDKLIREVKVITLKSKLVSDFRKDFQFYKVREINNYHHAHDAYLNAVVGTALIKKYPKLESEFVYGDYKVYDVRKMIAKSEQEIGKATAKYFFYSNIMNFFKTEITLANGEIRKRPLIETNGETGEIVWDKGRDFATVRKVLSMPQVNIVKKTEVQTGGFSKESILPKRNSDKLIARKKDWDPKKYGGFDSPTVAYSVLVVAKVEKGKSKKLKSVKELLGITIMERSSFEKNPIDFLEAKGYKEVKKDLIIKLPKYSLFELENGRKRMLASAGELQKGNELALPSKYVNFLYLASHYEKLKGSPEDNEQKQLFVEQHKHYLDEIIEQISEFSKRVILADANLDKVLSAYNKHRDKPIREQAENIIHLFTLTNLGAPAAFKYFDTTIDRKRYTSTKEVLDATLIHQSITGLYETRIDLSQLGGDGGPAPGGSGGGGGTLNLEDEYRLYETSAEPEVSPGSTWLSDFPQAWAETGGMGLAVRQAPLIIPLKATSTPVSIKQYPMSQEAKLGIKPHIQRLLDQGILVPCQSPWNTPLLPVKKPGTNDYRPVQDLREVNKRVEDIHPTVPNPYNLLSGLPPSHRWYTVLDLKDAFFCLRLHPTSQPLFAFEWRDPGMGISGQLTWTRLPQGFKNSPTLFNEALHRDLADFRIQHPDLILLQYVDDILLAATSELDCQQGTRALLLTLGNLGYRASAKKAQLCQKQVKYLGYLLKEGQRWLTEARKETVMGQPTPKTPRQLREFLGKAGFCRLFIPGFAEMAAPLYPLTKPGTLFNWGPDQQKAYQEIKQALLTAPALGLPDLTKPFELFVDEKQGYAKGVLTQKLGPWRRPVAYLSKKLDPVAAGWPPCLRMVAAIAVLRKDAGKLTMGQPLVILAPHAVEALVKQPPDRWLSNARMTHYQAMLLDTDRVQFGPVVALNPATLLPLPEEGAPHDCLEILAETHGTRPDLTDQPIPDADHTWYTDGSSFLQEGQRKAGAAVTTETEVIWARALPAGTSAQRAELIALTQALKMAEGKRLNVYTDSRYAFATAHIHGEIYRRRGWLTSEGREIKNKSEILALLKALFLPKRLSIIHCLGHQKGDSAEARGNRLADQAAREAAIKTPPDTSTLLAGKRTADGSEFEKRTADGSEFESPKKKAKVE

SEQ ID NO: 7021 - protein, 2094 aa, synthetic construct
MPAAKRVKLDGGDKKYSIGLDIGTNSVGWAVITDEYKVPSKKFKVLGNTDRHSIKKNLIGALLFDSGETAEATRLKRTARRRYTRRKNRICYLQEIFSNEMAKVDDSFFHRLEESFLVEEDKKHERHPIFGNIVDEVAYHEKYPTIYHLRKKLVDSTDKADLRLIYLALAHMIKFRGHFLIEGDLNPDNSDVDKLFIQLVQTYNQLFEENPINASGVDAKAILSARLSKSRRLENLIAQLPGEKKNGLFGNLIALSLGLTPNFKSNFDLAEDAKLQLSKDTYDDDLDNLLAQIGDQYADLFLAAKNLSDAILLSDILRVNTEITKAPLSASMIKRYDEHHQDLTLLKALVRQQLPEKYKEIFFDQSKNGYAGYIDGGASQEEFYKFIKPILEKMDGTEELLVKLNREDLLRKQRTFDNGSIPHQIHLGELHAILRRQEDFYPFLKDNREKIEKILTFRIPYYVGPLARGNSRFAWMTRKSEETITPWNFEEVVDKGASAQSFIERMTNFDKNLPNEKVLPKHSLLYEYFTVYNELTKVKYVTEGMRKPAFLSGEQKKAIVDLLFKTNRKVTVKQLKEDYFKKIECFDSVEISGVEDRFNASLGTYHDLLKIIKDKDFLDNEENEDILEDIVLTLTLFEDREMIEERLKTYAHLFDDKVMKQLKRRRYTGWGRLSRKLINGIRDKQSGKTILDFLKSDGFANRNFMQLIHDDSLTFKEDIQKAQVSGQGDSLHEHIANLAGSPAIKKGILQTVKVVDELVKVMGRHKPENIVIEMARENQTTQKGQKNSRERMKRIEEGIKELGSQILKEHPVENTQLQNEKLYLYYLQNGRDMYVDQELDINRLSDYDVDHIVPQSFLKDDSIDNKVLTRSDKARGKSDNVPSEEVVKKMKNYWRQLLNAKLITQRKFDNLTKAERGGLSELDKAGFIKRQLVETRQITKHVAQILDSRMNTKYDENDKLIREVKVITLKSKLVSDFRKDFQFYKVREINNYHHAHDAYLNAVVGTALIKKYPKLESEFVYGDYKVYDVRKMIAKSEQEIGKATAKYFFYSNIMNFFKTEITLANGEIRKRPLIETNGETGEIVWDKGRDFATVRKVLSMPQVNIVKKTEVQTGGFSKESILPKRNSDKLIARKKDWDPKKYGGFDSPTVAYSVLVVAKVEKGKSKKLKSVKELLGITIMERSSFEKNPIDFLEAKGYKEVKKDLIIKLPKYSLFELENGRKRMLASAGELQKGNELALPSKYVNFLYLASHYEKLKGSPEDNEQKQLFVEQHKHYLDEIIEQISEFSKRVILADANLDKVLSAYNKHRDKPIREQAENIIHLFTLTNLGAPAAFKYFDTTIDRKRYTSTKEVLDATLIHQSITGLYETRIDLSQLGGDGGPAPGGSGGGGGTLGIEDEYRLHETSTEPDVSLGSTWLSDFPQAWAETGGMGLAVRQAPLIIPLKATSTPVSIQQYPMSHEARLGIKPHIQRLLDQGILVPCQSPWNTPLLPVKKPGTNDYRPVQDLREVNKRVEDIHPTVPNPYNLLSGLPPSHQWYTVLDLKDAFFCLRLHPTSQPLFAFEWRDPGMGISGQLTWTRLPQGFKNSPTLFDEALHRDLADFRIQHPDLILLQYVDDILLAATSELDCQQGTRALLQTLGDLGYRASAKKAQICQKQVKYLGYLLREGQRWLTEARKETVMGQPVPKTPRQLREFLGTAGFCRLWIPGFAEMAAPLYPLTKTGTLFSWGPDQQKAYQEIKQALLTAPALGLPDLTKPFELFVDEKQGYAKGVLTQKLGPWRRPVAYLSKKLDPVAAGWPPCLRMVAAIAVLTKDAGKLTMGQPLVILAPHAVEALVKQPPDRWLSNARMTHYQAMLLDTDRVQFGPVVALNPATLLPLPEEGAPHDCLEILAETHGTRPDLTDQPIPDADHTWYTDGSSFLQEGQRKAGAAVTTETEVIWAGALPAGTSAQRAELIALTQALKMAEGKRLNVYTDSRYAFATAHIHGEIYRRRGLLTSEGREIKNKSEILALLKALFLPKRLSIIHCLGHQKGDSAEARGNRLADQAAREAAIKTPPDTSTLLAGKRTADGSEFEKRTADGSEFESPKKKAKVE

SEQ ID NO: 7022 - protein, 2094 aa, synthetic construct
MPAAKRVKLDGGDKKYSIGLDIGTNSVGWAVITDEYKVPSKKFKVLGNTDRHSIKKNLIGALLFDSGETAEATRLKRTARRRYTRRKNRICYLQEIFSNEMAKVDDSFFHRLEESFLVEEDKKHERHPIFGNIVDEVAYHEKYPTIYHLRKKLVDSTDKADLRLIYLALAHMIKFRGHFLIEGDLNPDNSDVDKLFIQLVQTYNQLFEENPINASGVDAKAILSARLSKSRRLENLIAQLPGEKKNGLFGNLIALSLGLTPNFKSNFDLAEDAKLQLSKDTYDDDLDNLLAQIGDQYADLFLAAKNLSDAILLSDILRVNTEITKAPLSASMIKRYDEHHQDLTLLKALVRQQLPEKYKEIFFDQSKNGYAGYIDGGASQEEFYKFIKPILEKMDGTEELLVKLNREDLLRKQRTFDNGSIPHQIHLGELHAILRRQEDFYPFLKDNREKIEKILTFRIPYYVGPLARGNSRFAWMTRKSEETITPWNFEEVVDKGASAQSFIERMTNFDKNLPNEKVLPKHSLLYEYFTVYNELTKVKYVTEGMRKPAFLSGEQKKAIVDLLFKTNRKVTVKQLKEDYFKKIECFDSVEISGVEDRFNASLGTYHDLLKIIKDKDFLDNEENEDILEDIVLTLTLFEDREMIEERLKTYAHLFDDKVMKQLKRRRYTGWGRLSRKLINGIRDKQSGKTILDFLKSDGFANRNFMQLIHDDSLTFKEDIQKAQVSGQGDSLHEHIANLAGSPAIKKGILQTVKVVDELVKVMGRHKPENIVIEMARENQTTQKGQKNSRERMKRIEEGIKELGSQILKEHPVENTQLQNEKLYLYYLQNGRDMYVDQELDINRLSDYDVDHIVPQSFLKDDSIDNKVLTRSDKARGKSDNVPSEEVVKKMKNYWRQLLNAKLITQRKFDNLTKAERGGLSELDKAGFIKRQLVETRQITKHVAQILDSRMNTKYDENDKLIREVKVITLKSKLVSDFRKDFQFYKVREINNYHHAHDAYLNAVVGTALIKKYPKLESEFVYGDYKVYDVRKMIAKSEQEIGKATAKYFFYSNIMNFFKTEITLANGEIRKRPLIETNGETGEIVWDKGRDFATVRKVLSMPQVNIVKKTEVQTGGFSKESILPKRNSDKLIARKKDWDPKKYGGFDSPTVAYSVLVVAKVEKGKSKKLKSVKELLGITIMERSSFEKNPIDFLEAKGYKEVKKDLIIKLPKYSLFELENGRKRMLASAGELQKGNELALPSKYVNFLYLASHYEKLKGSPEDNEQKQLFVEQHKHYLDEIIEQISEFSKRVILADANLDKVLSAYNKHRDKPIREQAENIIHLFTLTNLGAPAAFKYFDTTIDRKRYTSTKEVLDATLIHQSITGLYETRIDLSQLGGDGGPAPGGSGGGGGTLNIEDEHRLHETSKEPDVSLGSTWLSDFPQAWAETGGMGLAVRQAPLIIPLKATSTPVSIKQYPMSQEARLGIKPHIQRLLDQGILVPCQSPWNTPLLPVKKPGTNDYRPVQDLREVNKRVEDIHPTVPNPYNLLSGLPPSHQWYTVLDLKDAFFCLRLHPTSQPLFAFEWRDPEMGISGQLTWTRLPQGFKNSPTLFDEALHRDLADFRIQHPDLILLQYVDDLLLAATSELDCQQGTRALLQTLGNLGYRASAKKAQICQKQVKYLGYLLKEGQRWLTEARKETVMGQPTPKTPRQLREFLGTAGFCRLWIPGFAEMAAPLYPLTKTGTLFNWGPDQQKAYQEIKQALLTAPALGLPDLTKPFELFVDEKQGYAKGVLTQKLGPWRRPVAYLSKKLDPVAAGWPPCLRMVAAIAVLTKDAGKLTMGQPLVILAPHAVEALVKQPPDRWLSNARMTHYQALLLDTDRVQFGPVVALNPATLLPLPEEGLQHNCLDILAEAHGTRPDLTDQPLPDADHTWYTDGSSLLQEGQRKAGAAVTTETEVIWAKALPAGTSAQRAELIALTQALKMAEGKKLNVYTDSRYAFATAHIHGEIYRRRGLLTSEGKEIKNKDEILALLKALFLPKRLSIIHCPGHQKGHSAEARGNRMADQAARKAAITETPDTSTLLAGKRTADGSEFEKRTADGSEFESPKKKAKVE

SEQ ID NO: 7023 - protein, 2088 aa, synthetic construct
MPAAKRVKLDGGDKKYSIGLDIGTNSVGWAVITDEYKVPSKKFKVLGNTDRHSIKKNLIGALLFDSGETAEATRLKRTARRRYTRRKNRICYLQEIFSNEMAKVDDSFFHRLEESFLVEEDKKHERHPIFGNIVDEVAYHEKYPTIYHLRKKLVDSTDKADLRLIYLALAHMIKFRGHFLIEGDLNPDNSDVDKLFIQLVQTYNQLFEENPINASGVDAKAILSARLSKSRRLENLIAQLPGEKKNGLFGNLIALSLGLTPNFKSNFDLAEDAKLQLSKDTYDDDLDNLLAQIGDQYADLFLAAKNLSDAILLSDILRVNTEITKAPLSASMIKRYDEHHQDLTLLKALVRQQLPEKYKEIFFDQSKNGYAGYIDGGASQEEFYKFIKPILEKMDGTEELLVKLNREDLLRKQRTFDNGSIPHQIHLGELHAILRRQEDFYPFLKDNREKIEKILTFRIPYYVGPLARGNSRFAWMTRKSEETITPWNFEEVVDKGASAQSFIERMTNFDKNLPNEKVLPKHSLLYEYFTVYNELTKVKYVTEGMRKPAFLSGEQKKAIVDLLFKTNRKVTVKQLKEDYFKKIECFDSVEISGVEDRFNASLGTYHDLLKIIKDKDFLDNEENEDILEDIVLTLTLFEDREMIEERLKTYAHLFDDKVMKQLKRRRYTGWGRLSRKLINGIRDKQSGKTILDFLKSDGFANRNFMQLIHDDSLTFKEDIQKAQVSGQGDSLHEHIANLAGSPAIKKGILQTVKVVDELVKVMGRHKPENIVIEMARENQTTQKGQKNSRERMKRIEEGIKELGSQILKEHPVENTQLQNEKLYLYYLQNGRDMYVDQELDINRLSDYDVDHIVPQSFLKDDSIDNKVLTRSDKARGKSDNVPSEEVVKKMKNYWRQLLNAKLITQRKFDNLTKAERGGLSELDKAGFIKRQLVETRQITKHVAQILDSRMNTKYDENDKLIREVKVITLKSKLVSDFRKDFQFYKVREINNYHHAHDAYLNAVVGTALIKKYPKLESEFVYGDYKVYDVRKMIAKSEQEIGKATAKYFFYSNIMNFFKTEITLANGEIRKRPLIETNGETGEIVWDKGRDFATVRKVLSMPQVNIVKKTEVQTGGFSKESILPKRNSDKLIARKKDWDPKKYGGFDSPTVAYSVLVVAKVEKGKSKKLKSVKELLGITIMERSSFEKNPIDFLEAKGYKEVKKDLIIKLPKYSLFELENGRKRMLASAGELQKGNELALPSKYVNFLYLASHYEKLKGSPEDNEQKQLFVEQHKHYLDEIIEQISEFSKRVILADANLDKVLSAYNKHRDKPIREQAENIIHLFTLTNLGAPAAFKYFDTTIDRKRYTSTKEVLDATLIHQSITGLYETRIDLSQLGGDGGPAPGGSGGGGGTLQLDDEYRLYSPLVKPDQNIQFWLEQFPQAWAETAGMGLAKQVPPQVIQLKASATPVSVRQYPLSKEAQEGIRPHVQRLIQQGILVPVQSPWNTPLLPVRKPGTNDYRPVQDLREVNKRVQDIHPTVPNPYNLLCALPPQRSWYTVLDLKDAFFCLRLHPTSQPLFAFEWRDPGTGRTGQLTWTRLPQGFKNSPTIFDEALHRDLANFRIQHPQVTLLQYVDDLLLAGATKQDCLEGTKALLLELSDLGYRASAKKAQICRREVTYLGYSLRDGQRWLTEARKKTVVQIPAPTTAKQVREFLGTAGFCRLWIPGFATLAAPLYPLTKEKGEFSWAPEHQKAFDAIKKALLSAPALALPDVTKPFTLYVDERKGVARGVLTQTLGPWRRPVAYLSKKLDPVASGWPVCLKAIAAVAILVKDADKLTLGQNITVIAPHALENIVRQPPDRWMTNARMTHYQSLLLTERVTFAPPAALNPATLLPEETDEPVTHDCHQLLIEETGVRKDLTDIPLTGEVLTWFTDGSSYVVEGKRMAGAAVVDGTRTIWASSLPEGTSAQKAELMALTQALRLAEGKSINIYTDSRYAFATAHVHGAIYKQRGLLTSAGREIKNKEEILSLLEALHLPKRLAIIHCPGHQKAKDPISRGNQMADRVAKQAAQGVNLLAGKRTADGSEFEKRTADGSEFESPKKKAKVE

SEQ ID NO: 7024 - protein, 2085 aa, synthetic construct
MPAAKRVKLDGGDKKYSIGLDIGTNSVGWAVITDEYKVPSKKFKVLGNTDRHSIKKNLIGALLFDSGETAEATRLKRTARRRYTRRKNRICYLQEIFSNEMAKVDDSFFHRLEESFLVEEDKKHERHPIFGNIVDEVAYHEKYPTIYHLRKKLVDSTDKADLRLIYLALAHMIKFRGHFLIEGDLNPDNSDVDKLFIQLVQTYNQLFEENPINASGVDAKAILSARLSKSRRLENLIAQLPGEKKNGLFGNLIALSLGLTPNFKSNFDLAEDAKLQLSKDTYDDDLDNLLAQIGDQYADLFLAAKNLSDAILLSDILRVNTEITKAPLSASMIKRYDEHHQDLTLLKALVRQQLPEKYKEIFFDQSKNGYAGYIDGGASQEEFYKFIKPILEKMDGTEELLVKLNREDLLRKQRTFDNGSIPHQIHLGELHAILRRQEDFYPFLKDNREKIEKILTFRIPYYVGPLARGNSRFAWMTRKSEETITPWNFEEVVDKGASAQSFIERMTNFDKNLPNEKVLPKHSLLYEYFTVYNELTKVKYVTEGMRKPAFLSGEQKKAIVDLLFKTNRKVTVKQLKEDYFKKIECFDSVEISGVEDRFNASLGTYHDLLKIIKDKDFLDNEENEDILEDIVLTLTLFEDREMIEERLKTYAHLFDDKVMKQLKRRRYTGWGRLSRKLINGIRDKQSGKTILDFLKSDGFANRNFMQLIHDDSLTFKEDIQKAQVSGQGDSLHEHIANLAGSPAIKKGILQTVKVVDELVKVMGRHKPENIVIEMARENQTTQKGQKNSRERMKRIEEGIKELGSQILKEHPVENTQLQNEKLYLYYLQNGRDMYVDQELDINRLSDYDVDHIVPQSFLKDDSIDNKVLTRSDKARGKSDNVPSEEVVKKMKNYWRQLLNAKLITQRKFDNLTKAERGGLSELDKAGFIKRQLVETRQITKHVAQILDSRMNTKYDENDKLIREVKVITLKSKLVSDFRKDFQFYKVREINNYHHAHDAYLNAVVGTALIKKYPKLESEFVYGDYKVYDVRKMIAKSEQEIGKATAKYFFYSNIMNFFKTEITLANGEIRKRPLIETNGETGEIVWDKGRDFATVRKVLSMPQVNIVKKTEVQTGGFSKESILPKRNSDKLIARKKDWDPKKYGGFDSPTVAYSVLVVAKVEKGKSKKLKSVKELLGITIMERSSFEKNPIDFLEAKGYKEVKKDLIIKLPKYSLFELENGRKRMLASAGELQKGNELALPSKYVNFLYLASHYEKLKGSPEDNEQKQLFVEQHKHYLDEIIEQISEFSKRVILADANLDKVLSAYNKHRDKPIREQAENIIHLFTLTNLGAPAAFKYFDTTIDRKRYTSTKEVLDATLIHQSITGLYETRIDLSQLGGDGGPAPGGSGGGGGIPWLMKKPLQLTTLVPLQEYEERLLKQTMLTGSYKEKLQSLFLKYDALWQHWENQVGHRRIKPHHIATGTVNPRPQKQYPINPKAKASIQTVINDLLKQGVLIQQNSIMNTPVYPVPKPDGKWRMVLDYREVNKTIPLIAAQNQHSAGILSSIFRGKYKTTLDLSNGFWAHSITPESYWLTAFTWLGQQYCWTRLPQGFLNSPALFNADVVDLLKEVPNVQVYVDDIYISHDDPREHLEQLEKVFSLLLNAGYVVSLKKSEIAQHEVEFLGFNITKEGRGLTETFKQKLLNITPPRDLKQLQSILGKLNFARNFIPNFSELVKPLYNIIATAPGKYITWTTDNSQQLQNIISMLNSAENLEERNPEVRLIMKVNTSPSAGYIRFYNEFAKRPIMYLNYVYTKAEVKFTNTEKLLTTIHKGLIKALDLGMGQEILVYSPIVSMTKIQKTPLPERKALPIRWITWMSYLEDPRIQFHYDKTLPELQQVPTVTDDIIAKIKHPSEFSMVFYTDGSAIKHPNVNKSHNAGMGIAQVQFKPEFTVINTWSIPLGDHTAQLAEVAAVEFACKKALKIDGPVLIVTDSFYVAESVNKELPYWQSNGFFNNKKKPLKHVSKWKSIADCIQLKPDIIIIHEKGHQPTASTFHTEGNNLADKLATQGSYVVNAGKRTADGSEFEKRTADGSEFESPKKKAKVE

SEQ ID NO: 7025 - protein, 2096 aa, synthetic construct
MPAAKRVKLDGGDKKYSIGLDIGTNSVGWAVITDEYKVPSKKFKVLGNTDRHSIKKNLIGALLFDSGETAEATRLKRTARRRYTRRKNRICYLQEIFSNEMAKVDDSFFHRLEESFLVEEDKKHERHPIFGNIVDEVAYHEKYPTIYHLRKKLVDSTDKADLRLIYLALAHMIKFRGHFLIEGDLNPDNSDVDKLFIQLVQTYNQLFEENPINASGVDAKAILSARLSKSRRLENLIAQLPGEKKNGLFGNLIALSLGLTPNFKSNFDLAEDAKLQLSKDTYDDDLDNLLAQIGDQYADLFLAAKNLSDAILLSDILRVNTEITKAPLSASMIKRYDEHHQDLTLLKALVRQQLPEKYKEIFFDQSKNGYAGYIDGGASQEEFYKFIKPILEKMDGTEELLVKLNREDLLRKQRTFDNGSIPHQIHLGELHAILRRQEDFYPFLKDNREKIEKILTFRIPYYVGPLARGNSRFAWMTRKSEETITPWNFEEVVDKGASAQSFIERMTNFDKNLPNEKVLPKHSLLYEYFTVYNELTKVKYVTEGMRKPAFLSGEQKKAIVDLLFKTNRKVTVKQLKEDYFKKIECFDSVEISGVEDRFNASLGTYHDLLKIIKDKDFLDNEENEDILEDIVLTLTLFEDREMIEERLKTYAHLFDDKVMKQLKRRRYTGWGRLSRKLINGIRDKQSGKTILDFLKSDGFANRNFMQLIHDDSLTFKEDIQKAQVSGQGDSLHEHIANLAGSPAIKKGILQTVKVVDELVKVMGRHKPENIVIEMARENQTTQKGQKNSRERMKRIEEGIKELGSQILKEHPVENTQLQNEKLYLYYLQNGRDMYVDQELDINRLSDYDVDHIVPQSFLKDDSIDNKVLTRSDKARGKSDNVPSEEVVKKMKNYWRQLLNAKLITQRKFDNLTKAERGGLSELDKAGFIKRQLVETRQITKHVAQILDSRMNTKYDENDKLIREVKVITLKSKLVSDFRKDFQFYKVREINNYHHAHDAYLNAVVGTALIKKYPKLESEFVYGDYKVYDVRKMIAKSEQEIGKATAKYFFYSNIMNFFKTEITLANGEIRKRPLIETNGETGEIVWDKGRDFATVRKVLSMPQVNIVKKTEVQTGGFSKESILPKRNSDKLIARKKDWDPKKYGGFDSPTVAYSVLVVAKVEKGKSKKLKSVKELLGITIMERSSFEKNPIDFLEAKGYKEVKKDLIIKLPKYSLFELENGRKRMLASAGELQKGNELALPSKYVNFLYLASHYEKLKGSPEDNEQKQLFVEQHKHYLDEIIEQISEFSKRVILADANLDKVLSAYNKHRDKPIREQAENIIHLFTLTNLGAPAAFKYFDTTIDRKRYTSTKEVLDATLIHQSITGLYETRIDLSQLGGDGGPAPGGGGGSGGTAPLEEEYRLFLEAPIQNVTLLEQWKREIPKVWAEINPPGLASTQAPIHVQLLSTALPVRVRQYPITLEAKRSLRETIRKFRAAGILRPVHSPWNTPLLPVRKSGTSEYRMVQDLREVNKRVETIHPTVPNPYTLLSLLPPDRIWYSVLDLKDAFFCIPLAPESQLIFAFEWADAEEGESGQLTWTRLPQGFKNSPTLFDEALNRDLQGFRLDHPSVSLLQYVDDLLIAADTQAACLSATRDLLMTLAELGYRVSGKKAQLCQEEVTYLGFKIHKGSRSLSNSRTQAILQIPVPKTKRQVREFLGTIGYCRLWIPGFAELAQPLYAATRGGNDPLVWGEKEEEAFQSLKLALTQPPALALPSLDKPFQLFVEETSGAAKGVLTQALGPWKRPVAYLSKRLDPVAAGWPRCLRAIAAAALLTREASKLTFGQDIEITSSHNLESLLRSPPDKWLTNARITQYQVLLLDPPRVRFKQTAALNPATLLPETDDTLPIHHCLDTLDSLTSTRPDLTDQPLAQAEATLFTDGSSYIRDGKRYAGAAVVTLDSVIWAEPLPIGTSAQKAELIALTKALEWSKDKSVNIYTDSRYAFATLHVHGMIYRERGLLTAGGKAIKNAPEILALLTAVWLPKRVAVMHCKGHQKDDAPTSTGNRRADEVAREVAIRPLSTQATISAGKRTADGSEFEKRTADGSEFESPKKKAKVE

SEQ ID NO: 7026 - protein, 2100 aa, synthetic construct
MPAAKRVKLDGGDKKYSIGLDIGTNSVGWAVITDEYKVPSKKFKVLGNTDRHSIKKNLIGALLFDSGETAEATRLKRTARRRYTRRKNRICYLQEIFSNEMAKVDDSFFHRLEESFLVEEDKKHERHPIFGNIVDEVAYHEKYPTIYHLRKKLVDSTDKADLRLIYLALAHMIKFRGHFLIEGDLNPDNSDVDKLFIQLVQTYNQLFEENPINASGVDAKAILSARLSKSRRLENLIAQLPGEKKNGLFGNLIALSLGLTPNFKSNFDLAEDAKLQLSKDTYDDDLDNLLAQIGDQYADLFLAAKNLSDAILLSDILRVNTEITKAPLSASMIKRYDEHHQDLTLLKALVRQQLPEKYKEIFFDQSKNGYAGYIDGGASQEEFYKFIKPILEKMDGTEELLVKLNREDLLRKQRTFDNGSIPHQIHLGELHAILRRQEDFYPFLKDNREKIEKILTFRIPYYVGPLARGNSRFAWMTRKSEETITPWNFEEVVDKGASAQSFIERMTNFDKNLPNEKVLPKHSLLYEYFTVYNELTKVKYVTEGMRKPAFLSGEQKKAIVDLLFKTNRKVTVKQLKEDYFKKIECFDSVEISGVEDRFNASLGTYHDLLKIIKDKDFLDNEENEDILEDIVLTLTLFEDREMIEERLKTYAHLFDDKVMKQLKRRRYTGWGRLSRKLINGIRDKQSGKTILDFLKSDGFANRNFMQLIHDDSLTFKEDIQKAQVSGQGDSLHEHIANLAGSPAIKKGILQTVKVVDELVKVMGRHKPENIVIEMARENQTTQKGQKNSRERMKRIEEGIKELGSQILKEHPVENTQLQNEKLYLYYLQNGRDMYVDQELDINRLSDYDVDHIVPQSFLKDDSIDNKVLTRSDKARGKSDNVPSEEVVKKMKNYWRQLLNAKLITQRKFDNLTKAERGGLSELDKAGFIKRQLVETRQITKHVAQILDSRMNTKYDENDKLIREVKVITLKSKLVSDFRKDFQFYKVREINNYHHAHDAYLNAVVGTALIKKYPKLESEFVYGDYKVYDVRKMIAKSEQEIGKATAKYFFYSNIMNFFKTEITLANGEIRKRPLIETNGETGEIVWDKGRDFATVRKVLSMPQVNIVKKTEVQTGGFSKESILPKRNSDKLIARKKDWDPKKYGGFDSPTVAYSVLVVAKVEKGKSKKLKSVKELLGITIMERSSFEKNPIDFLEAKGYKEVKKDLIIKLPKYSLFELENGRKRMLASAGELQKGNELALPSKYVNFLYLASHYEKLKGSPEDNEQKQLFVEQHKHYLDEIIEQISEFSKRVILADANLDKVLSAYNKHRDKPIREQAENIIHLFTLTNLGAPAAFKYFDTTIDRKRYTSTKEVLDATLIHQSITGLYETRIDLSQLGGDGGPAPGGGGGSGGTVSLQDEHRLFDIPVTTSLPDVWLQDFPQAWAETGGLGRAKCQAPIIIDLKPTAVPVSIKQYPMSLEAHMGIRQHIIKFLELGVLRPCRSPWNTPLLPVKKPGTQDYRPVQDLREINKRTVDIHPTVPNPYNLLSTLKPDYSWYTVLDLKDAFFCLPLAPQSQELFAFEWKDPERGISGQLTWTRLPQGFKNSPTLFNEALHRDLTDFRTQHPEVTLLQYVDDLLLAAPTKKACTQGTRHLLQELGEKGYRASAKKAQICQTKVTYLGYILSEGKRWLTPGRIETVARIPPPRNPREVREFLGTAGFCRLWIPGFAELAAPLYALTKPSTPFTWQTEHQLAFEALKKALLSAPALGLPDTSKPFTLFLDERQGIAKGVLTQKLGPWKRPVAYLSKKLDPVAAGWPPCLRIMAATAMLVKDSAKLTLGQPLTVITPHTLEAIVRQPPDRWITNARLTHYQALLLDTDRVQFGPPVTLNPATLLPVPENQPSPHDCRQVLAETHGTREDLKDQELPDADHTWYTDGSSYLDSGTRRAGAAVVDGHNTIWAQSLPPGTSAQKAELIALTKALELSKGKKANIYTDSRYAFATAHTHGSIYERRGWLTSEGKEIKNKAEIIALLKALFLPQEVAIIHCPGHQKGQDPVAVGNRQADRVARQAAMAEVLTLATEPDNTSHITAGKRTADGSEFEKRTADGSEFESPKKKAKVE

SEQ ID NO: 7027 - protein, 2171 aa, synthetic construct
MPAAKRVKLDGGDKKYSIGLDIGTNSVGWAVITDEYKVPSKKFKVLGNTDRHSIKKNLIGALLFDSGETAEATRLKRTARRRYTRRKNRICYLQEIFSNEMAKVDDSFFHRLEESFLVEEDKKHERHPIFGNIVDEVAYHEKYPTIYHLRKKLVDSTDKADLRLIYLALAHMIKFRGHFLIEGDLNPDNSDVDKLFIQLVQTYNQLFEENPINASGVDAKAILSARLSKSRRLENLIAQLPGEKKNGLFGNLIALSLGLTPNFKSNFDLAEDAKLQLSKDTYDDDLDNLLAQIGDQYADLFLAAKNLSDAILLSDILRVNTEITKAPLSASMIKRYDEHHQDLTLLKALVRQQLPEKYKEIFFDQSKNGYAGYIDGGASQEEFYKFIKPILEKMDGTEELLVKLNREDLLRKQRTFDNGSIPHQIHLGELHAILRRQEDFYPFLKDNREKIEKILTFRIPYYVGPLARGNSRFAWMTRKSEETITPWNFEEVVDKGASAQSFIERMTNFDKNLPNEKVLPKHSLLYEYFTVYNELTKVKYVTEGMRKPAFLSGEQKKAIVDLLFKTNRKVTVKQLKEDYFKKIECFDSVEISGVEDRFNASLGTYHDLLKIIKDKDFLDNEENEDILEDIVLTLTLFEDREMIEERLKTYAHLFDDKVMKQLKRRRYTGWGRLSRKLINGIRDKQSGKTILDFLKSDGFANRNFMQLIHDDSLTFKEDIQKAQVSGQGDSLHEHIANLAGSPAIKKGILQTVKVVDELVKVMGRHKPENIVIEMARENQTTQKGQKNSRERMKRIEEGIKELGSQILKEHPVENTQLQNEKLYLYYLQNGRDMYVDQELDINRLSDYDVDHIVPQSFLKDDSIDNKVLTRSDKARGKSDNVPSEEVVKKMKNYWRQLLNAKLITQRKFDNLTKAERGGLSELDKAGFIKRQLVETRQITKHVAQILDSRMNTKYDENDKLIREVKVITLKSKLVSDFRKDFQFYKVREINNYHHAHDAYLNAVVGTALIKKYPKLESEFVYGDYKVYDVRKMIAKSEQEIGKATAKYFFYSNIMNFFKTEITLANGEIRKRPLIETNGETGEIVWDKGRDFATVRKVLSMPQVNIVKKTEVQTGGFSKESILPKRNSDKLIARKKDWDPKKYGGFDSPTVAYSVLVVAKVEKGKSKKLKSVKELLGITIMERSSFEKNPIDFLEAKGYKEVKKDLIIKLPKYSLFELENGRKRMLASAGELQKGNELALPSKYVNFLYLASHYEKLKGSPEDNEQKQLFVEQHKHYLDEIIEQISEFSKRVILADANLDKVLSAYNKHRDKPIREQAENIIHLFTLTNLGAPAAFKYFDTTIDRKRYTSTKEVLDATLIHQSITGLYETRIDLSQLGGDGGPAPGGGGGSGGMDLLKPLTVERKGVKIKGYWNSQADITCVPKDLLQGEEPVRQQNVTTIHGTQEGDVYYVNLKIDGRRINTEVIGTTLDYAIITPGDVPWILKKPLELTIKLDLEEQQGTLLNNSILSKKGKEELKQLFEKYSALWQSWENQVGHRRIRPHKIATGTVKPTPQKQYHINPKAKPDIQIVINDLLKQGVLIQKESTMNTPVYPVPKPNGRWRMVLDYRAVNKVTPLIAVQNQHSYGILGSLFKGRYKTTIDLSNGFWAHPIVPEDYWITAFTWQGKQYCWTVLPQGFLNSPGLFTGDVVDLLQGIPNVEVYVDDVYISHDSEKEHLEYLDILFNRLKEAGYIISLKKSNIANSIVDFLGFQITNEGRGLTDTFKEKLENITAPTTLKQLQSILGLLNFARNFIPDFTELIAPLYALIPKSTKNYVPWQIEHSTTLETLITKLNGAEYLQGRKGDKTLIMKVNASYTTGYIRYYNEGEKKPISYVSIVFSKTELKFTELEKLLTTVHKGLLKALDLSMGQNIHVYSPIVSMQNIQKTPQTAKKALASRWLSWLSYLEDPRIRFFYDPQMPALKDLPAVDTGKDNKKHPSNFQHIFYTDGSAITSPTKEGHLNAGMGIVYFINKDGNLQKQQEWSISLGNHTAQFAEIAAFEFALKKCLPLGGNILVVTDSNYVAKAYNEELDVWASNGFVNNRKKPLKHISKWKSVADLKRLRPDVVVTHEPGHQKLDSSPHAYGNNLADQLATQASFKVHAGKRTADGSEFEKRTADGSEFESPKKKAKVE

SEQ ID NO: 7028 - protein, 2085 aa, synthetic construct
MPAAKRVKLDGGDKKYSIGLDIGTNSVGWAVITDEYKVPSKKFKVLGNTDRHSIKKNLIGALLFDSGETAEATRLKRTARRRYTRRKNRICYLQEIFSNEMAKVDDSFFHRLEESFLVEEDKKHERHPIFGNIVDEVAYHEKYPTIYHLRKKLVDSTDKADLRLIYLALAHMIKFRGHFLIEGDLNPDNSDVDKLFIQLVQTYNQLFEENPINASGVDAKAILSARLSKSRRLENLIAQLPGEKKNGLFGNLIALSLGLTPNFKSNFDLAEDAKLQLSKDTYDDDLDNLLAQIGDQYADLFLAAKNLSDAILLSDILRVNTEITKAPLSASMIKRYDEHHQDLTLLKALVRQQLPEKYKEIFFDQSKNGYAGYIDGGASQEEFYKFIKPILEKMDGTEELLVKLNREDLLRKQRTFDNGSIPHQIHLGELHAILRRQEDFYPFLKDNREKIEKILTFRIPYYVGPLARGNSRFAWMTRKSEETITPWNFEEVVDKGASAQSFIERMTNFDKNLPNEKVLPKHSLLYEYFTVYNELTKVKYVTEGMRKPAFLSGEQKKAIVDLLFKTNRKVTVKQLKEDYFKKIECFDSVEISGVEDRFNASLGTYHDLLKIIKDKDFLDNEENEDILEDIVLTLTLFEDREMIEERLKTYAHLFDDKVMKQLKRRRYTGWGRLSRKLINGIRDKQSGKTILDFLKSDGFANRNFMQLIHDDSLTFKEDIQKAQVSGQGDSLHEHIANLAGSPAIKKGILQTVKVVDELVKVMGRHKPENIVIEMARENQTTQKGQKNSRERMKRIEEGIKELGSQILKEHPVENTQLQNEKLYLYYLQNGRDMYVDQELDINRLSDYDVDHIVPQSFLKDDSIDNKVLTRSDKARGKSDNVPSEEVVKKMKNYWRQLLNAKLITQRKFDNLTKAERGGLSELDKAGFIKRQLVETRQITKHVAQILDSRMNTKYDENDKLIREVKVITLKSKLVSDFRKDFQFYKVREINNYHHAHDAYLNAVVGTALIKKYPKLESEFVYGDYKVYDVRKMIAKSEQEIGKATAKYFFYSNIMNFFKTEITLANGEIRKRPLIETNGETGEIVWDKGRDFATVRKVLSMPQVNIVKKTEVQTGGFSKESILPKRNSDKLIARKKDWDPKKYGGFDSPTVAYSVLVVAKVEKGKSKKLKSVKELLGITIMERSSFEKNPIDFLEAKGYKEVKKDLIIKLPKYSLFELENGRKRMLASAGELQKGNELALPSKYVNFLYLASHYEKLKGSPEDNEQKQLFVEQHKHYLDEIIEQISEFSKRVILADANLDKVLSAYNKHRDKPIREQAENIIHLFTLTNLGAPAAFKYFDTTIDRKRYTSTKEVLDATLIHQSITGLYETRIDLSQLGGDGGPAPGGGGGSGGVPWILKKPLELTIKLDLEEQQGTLLNNSILSKKGKEELKQLFEKYSALWQSWENQVGHRRIRPHKIATGTVKPTPQKQYHINPKAKPDIQIVINDLLKQGVLIQKESTMNTPVYPVPKPNGRWRMVLDYRAVNKVTPLIAVQNQHSYGILGSLFKGRYKTTIDLSNGFWAHPIVPEDYWITAFTWQGKQYCWTVLPQGFLNSPGLFTGDVVDLLQGIPNVEVYVDDVYISHDSEKEHLEYLDILFNRLKEAGYIISLKKSNIANSIVDFLGFQITNEGRGLTDTFKEKLENITAPTTLKQLQSILGLLNFARNFIPDFTELIAPLYALIPKSTKNYVPWQIEHSTTLETLITKLNGAEYLQGRKGDKTLIMKVNASYTTGYIRYYNEGEKKPISYVSIVFSKTELKFTELEKLLTTVHKGLLKALDLSMGQNIHVYSPIVSMQNIQKTPQTAKKALASRWLSWLSYLEDPRIRFFYDPQMPALKDLPAVDTGKDNKKHPSNFQHIFYTDGSAITSPTKEGHLNAGMGIVYFINKDGNLQKQQEWSISLGNHTAQFAEIAAFEFALKKCLPLGGNILVVTDSNYVAKAYNEELDVWASNGFVNNRKKPLKHISKWKSVADLKRLRPDVVVTHEPGHQKLDSSPHAYGNNLADQLATQASFKVHAGKRTADGSEFEKRTADGSEFESPKKKAKVE

SEQ ID NO: 7029 - protein, 2093 aa, synthetic construct
MPAAKRVKLDGGDKKYSIGLDIGTNSVGWAVITDEYKVPSKKFKVLGNTDRHSIKKNLIGALLFDSGETAEATRLKRTARRRYTRRKNRICYLQEIFSNEMAKVDDSFFHRLEESFLVEEDKKHERHPIFGNIVDEVAYHEKYPTIYHLRKKLVDSTDKADLRLIYLALAHMIKFRGHFLIEGDLNPDNSDVDKLFIQLVQTYNQLFEENPINASGVDAKAILSARLSKSRRLENLIAQLPGEKKNGLFGNLIALSLGLTPNFKSNFDLAEDAKLQLSKDTYDDDLDNLLAQIGDQYADLFLAAKNLSDAILLSDILRVNTEITKAPLSASMIKRYDEHHQDLTLLKALVRQQLPEKYKEIFFDQSKNGYAGYIDGGASQEEFYKFIKPILEKMDGTEELLVKLNREDLLRKQRTFDNGSIPHQIHLGELHAILRRQEDFYPFLKDNREKIEKILTFRIPYYVGPLARGNSRFAWMTRKSEETITPWNFEEVVDKGASAQSFIERMTNFDKNLPNEKVLPKHSLLYEYFTVYNELTKVKYVTEGMRKPAFLSGEQKKAIVDLLFKTNRKVTVKQLKEDYFKKIECFDSVEISGVEDRFNASLGTYHDLLKIIKDKDFLDNEENEDILEDIVLTLTLFEDREMIEERLKTYAHLFDDKVMKQLKRRRYTGWGRLSRKLINGIRDKQSGKTILDFLKSDGFANRNFMQLIHDDSLTFKEDIQKAQVSGQGDSLHEHIANLAGSPAIKKGILQTVKVVDELVKVMGRHKPENIVIEMARENQTTQKGQKNSRERMKRIEEGIKELGSQILKEHPVENTQLQNEKLYLYYLQNGRDMYVDQELDINRLSDYDVDHIVPQSFLKDDSIDNKVLTRSDKARGKSDNVPSEEVVKKMKNYWRQLLNAKLITQRKFDNLTKAERGGLSELDKAGFIKRQLVETRQITKHVAQILDSRMNTKYDENDKLIREVKVITLKSKLVSDFRKDFQFYKVREINNYHHAHDAYLNAVVGTALIKKYPKLESEFVYGDYKVYDVRKMIAKSEQEIGKATAKYFFYSNIMNFFKTEITLANGEIRKRPLIETNGETGEIVWDKGRDFATVRKVLSMPQVNIVKKTEVQTGGFSKESILPKRNSDKLIARKKDWDPKKYGGFDSPTVAYSVLVVAKVEKGKSKKLKSVKELLGITIMERSSFEKNPIDFLEAKGYKEVKKDLIIKLPKYSLFELENGRKRMLASAGELQKGNELALPSKYVNFLYLASHYEKLKGSPEDNEQKQLFVEQHKHYLDEIIEQISEFSKRVILADANLDKVLSAYNKHRDKPIREQAENIIHLFTLTNLGAPAAFKYFDTTIDRKRYTSTKEVLDATLIHQSITGLYETRIDLSQLGGDGGPAPGGGGGSGGTLQLEEEYRLFEPESTQKQEMDIWLKNFPQAWAETGGMGTAHCQAPVLIQLKATATPISIRQYPMPHEAYQGIKPHIRRMLDQGILKPCQSPWNTPLLPVKKPGTEDYRPVQDLREVNKRVEDIHPTVPNPYNLLSTLPPSHPWYTVLDLKDAFFCLRLHSESQLLFAFEWRDPEIGLSGQLTWTRLPQGFKNSPTLFNEALHSDLADFRVRYPALVLLQYVDDLLLAAATRTECLEGTKALLETLGNKGYRASAKKAQICLQEVTYLGYSLKDGQRWLTKARKEAILSIPVPKNSRQVREFLGTAGYCRLWIPGFAELAAPLYPLTRPGTLFQWGTEQQLAFEDIKKALLSSPALGLPDITKPFELFIDENSGFAKGVLVQKLGPWKRPVAYLSKKLDTVASGWPPCLRMVAAIAILVKDAGKLTLGQPLTILTSHPVEALVRQPPNKWLSNARMTHYQAMLLDAERVHFGPTVSLNPATLLPLPSGGNHHDCLQILAETHGTRPDLTDQPLPDADLTWYTDGSSFIRNGEREAGAAVTTESEVIWAAPLPPGTSAQRAELIALTQALKMAEGKKLTVYTDSRYAFATTHVHGEIYRRRGWLTSEGKEIKNKNEILALLEALFLPKRLSIIHCPGHQKGDSPQAKGNRLADDTAKKAATETHSSLTVLPAGKRTADGSEFEKRTADGSEFESPKKKAKVE

SEQ ID NO: 7030 - protein, 2125 aa, synthetic construct
MPAAKRVKLDGGDKKYSIGLDIGTNSVGWAVITDEYKVPSKKFKVLGNTDRHSIKKNLIGALLFDSGETAEATRLKRTARRRYTRRKNRICYLQEIFSNEMAKVDDSFFHRLEESFLVEEDKKHERHPIFGNIVDEVAYHEKYPTIYHLRKKLVDSTDKADLRLIYLALAHMIKFRGHFLIEGDLNPDNSDVDKLFIQLVQTYNQLFEENPINASGVDAKAILSARLSKSRRLENLIAQLPGEKKNGLFGNLIALSLGLTPNFKSNFDLAEDAKLQLSKDTYDDDLDNLLAQIGDQYADLFLAAKNLSDAILLSDILRVNTEITKAPLSASMIKRYDEHHQDLTLLKALVRQQLPEKYKEIFFDQSKNGYAGYIDGGASQEEFYKFIKPILEKMDGTEELLVKLNREDLLRKQRTFDNGSIPHQIHLGELHAILRRQEDFYPFLKDNREKIEKILTFRIPYYVGPLARGNSRFAWMTRKSEETITPWNFEEVVDKGASAQSFIERMTNFDKNLPNEKVLPKHSLLYEYFTVYNELTKVKYVTEGMRKPAFLSGEQKKAIVDLLFKTNRKVTVKQLKEDYFKKIECFDSVEISGVEDRFNASLGTYHDLLKIIKDKDFLDNEENEDILEDIVLTLTLFEDREMIEERLKTYAHLFDDKVMKQLKRRRYTGWGRLSRKLINGIRDKQSGKTILDFLKSDGFANRNFMQLIHDDSLTFKEDIQKAQVSGQGDSLHEHIANLAGSPAIKKGILQTVKVVDELVKVMGRHKPENIVIEMARENQTTQKGQKNSRERMKRIEEGIKELGSQILKEHPVENTQLQNEKLYLYYLQNGRDMYVDQELDINRLSDYDVDHIVPQSFLKDDSIDNKVLTRSDKARGKSDNVPSEEVVKKMKNYWRQLLNAKLITQRKFDNLTKAERGGLSELDKAGFIKRQLVETRQITKHVAQILDSRMNTKYDENDKLIREVKVITLKSKLVSDFRKDFQFYKVREINNYHHAHDAYLNAVVGTALIKKYPKLESEFVYGDYKVYDVRKMIAKSEQEIGKATAKYFFYSNIMNFFKTEITLANGEIRKRPLIETNGETGEIVWDKGRDFATVRKVLSMPQVNIVKKTEVQTGGFSKESILPKRNSDKLIARKKDWDPKKYGGFDSPTVAYSVLVVAKVEKGKSKKLKSVKELLGITIMERSSFEKNPIDFLEAKGYKEVKKDLIIKLPKYSLFELENGRKRMLASAGELQKGNELALPSKYVNFLYLASHYEKLKGSPEDNEQKQLFVEQHKHYLDEIIEQISEFSKRVILADANLDKVLSAYNKHRDKPIREQAENIIHLFTLTNLGAPAAFKYFDTTIDRKRYTSTKEVLDATLIHQSITGLYETRIDLSQLGGDGGPAPGGGGGSGGLLGRDLLTKLKAQIQFSTEGPQVTWEDRPAMCLVLNLEEEYRLHEKPVPPSIDPSWLQLFPMVWAEKAGMGLANQVPPVVVELKSDASPVAVRQYPMSKEAREGIRPHIQRFLDLGILVPCQSPWNTPLLPVKKPGTNDYRPVQDLREVNKRVQDIHPTVPNPYNLLSSLPPSHTWYSVLDLKDAFFCLKLHPNSQPLFAFEWRDPEKGNTGQLTWTRLPQGFKNSPTLFNEALHRDLASFRALNPQVVMLQYVDDLLVAAPTYRDCKEGTRRLLQELSKLGYRVSAKKAQLCREEVTYLGYLLKGGKRWLTPARKATVMKIPTPTTPRQVREFLGTAGFCRLWIPGFASLAAPLYPLTRPKVPFTWTEAHQEAFGRIKEALLSAPALALPDLTKPFALYVDEKEGVARGVLTQTLGPWRRPVAYLSKKLDPVASGWPTCLKAIAAVALLLKDADKLTLGQNVLVIAPHNLESIVRQPPDRWMTNARMTHYQSLLLNERVSFAPPAILNPATLLPVESDDTPIHICSEILAEETGTRPDLRDQPLPGVPAWYTDGSSFIMDGRRQAGAAIVDNKRTVWASNLPEGTSAQKAELIALTQALRLAEGKSINIYTDSRYAFATAHVHGAIYKQRGWLTSAGKDIKNKEEILALLEAIHLPKRVAIIHCPGHQRGTDPVATGNRKADEAAKQAAQSTRILTETTKNAGKRTADGSEFEKRTADGSEFESPKKKAKVE

SEQ ID NO: 7031 - protein, 2125 aa, synthetic construct
MPAAKRVKLDGGDKKYSIGLDIGTNSVGWAVITDEYKVPSKKFKVLGNTDRHSIKKNLIGALLFDSGETAEATRLKRTARRRYTRRKNRICYLQEIFSNEMAKVDDSFFHRLEESFLVEEDKKHERHPIFGNIVDEVAYHEKYPTIYHLRKKLVDSTDKADLRLIYLALAHMIKFRGHFLIEGDLNPDNSDVDKLFIQLVQTYNQLFEENPINASGVDAKAILSARLSKSRRLENLIAQLPGEKKNGLFGNLIALSLGLTPNFKSNFDLAEDAKLQLSKDTYDDDLDNLLAQIGDQYADLFLAAKNLSDAILLSDILRVNTEITKAPLSASMIKRYDEHHQDLTLLKALVRQQLPEKYKEIFFDQSKNGYAGYIDGGASQEEFYKFIKPILEKMDGTEELLVKLNREDLLRKQRTFDNGSIPHQIHLGELHAILRRQEDFYPFLKDNREKIEKILTFRIPYYVGPLARGNSRFAWMTRKSEETITPWNFEEVVDKGASAQSFIERMTNFDKNLPNEKVLPKHSLLYEYFTVYNELTKVKYVTEGMRKPAFLSGEQKKAIVDLLFKTNRKVTVKQLKEDYFKKIECFDSVEISGVEDRFNASLGTYHDLLKIIKDKDFLDNEENEDILEDIVLTLTLFEDREMIEERLKTYAHLFDDKVMKQLKRRRYTGWGRLSRKLINGIRDKQSGKTILDFLKSDGFANRNFMQLIHDDSLTFKEDIQKAQVSGQGDSLHEHIANLAGSPAIKKGILQTVKVVDELVKVMGRHKPENIVIEMARENQTTQKGQKNSRERMKRIEEGIKELGSQILKEHPVENTQLQNEKLYLYYLQNGRDMYVDQELDINRLSDYDVDHIVPQSFLKDDSIDNKVLTRSDKARGKSDNVPSEEVVKKMKNYWRQLLNAKLITQRKFDNLTKAERGGLSELDKAGFIKRQLVETRQITKHVAQILDSRMNTKYDENDKLIREVKVITLKSKLVSDFRKDFQFYKVREINNYHHAHDAYLNAVVGTALIKKYPKLESEFVYGDYKVYDVRKMIAKSEQEIGKATAKYFFYSNIMNFFKTEITLANGEIRKRPLIETNGETGEIVWDKGRDFATVRKVLSMPQVNIVKKTEVQTGGFSKESILPKRNSDKLIARKKDWDPKKYGGFDSPTVAYSVLVVAKVEKGKSKKLKSVKELLGITIMERSSFEKNPIDFLEAKGYKEVKKDLIIKLPKYSLFELENGRKRMLASAGELQKGNELALPSKYVNFLYLASHYEKLKGSPEDNEQKQLFVEQHKHYLDEIIEQISEFSKRVILADANLDKVLSAYNKHRDKPIREQAENIIHLFTLTNLGAPAAFKYFDTTIDRKRYTSTKEVLDATLIHQSITGLYETRIDLSQLGGDGGPAPGGGGGSGGLLGRDLLTKLKAQIQFSTEGPQVTWEDRPAMCLVLNLEEEYRLHEKPVPPSIDPSWLQLFPMVWAEKAGMGLANQVPPVVVELKSDASPVAVRQYPMSKEAREGIRPHIQRFLDLGILVPCQSPWNTPLLPVKKPGTNDYRPVQDLREVNKRVQDIHPTVPNPYNLLSSLPPSHTWYSVLDLKDAFFCLKLHPNSQPLFAFEWRDPEKGNTGQLTWTRLPQGFKNSPTLFNEALHRDLASFRALNPQVVMLQYVDDLLVAAPTYRDCKEGTRRLLQELSKLGYRVSAKKAQLCREEVTYLGYLLKGGKRWLTPARKATVMKIPTPTTPRQVREFLGKAGFCRLFIPGFASLAAPLYPLTRPKVPFTWTEAHQEAFGRIKEALLSAPALALPDLTKPFALYVDEKEGVARGVLTQTLGPWRRPVAYLSKKLDPVASGWPTCLKAIAAVALLLKDADKLTLGQNVLVIAPHNLESIVRQPPDRWMTNARMTHYQSLLLNERVSFAPPAILNPATLLPVESDDTPIHICSEILAEETGTRPDLRDQPLPGVPAWYTDGSSFIMDGRRQAGAAIVDNKRTVWASNLPEGTSAQKAELIALTQALRLAEGKSINIYTDSRYAFATAHVHGAIYKQRGWLTSAGKDIKNKEEILALLEAIHLPKRVAIIHCPGHQRGTDPVATGNRKADEAAKQAAQSTRILTETTKNAGKRTADGSEFEKRTADGSEFESPKKKAKVE

SEQ ID NO: 7032 - protein, 2094 aa, synthetic construct
MPAAKRVKLDGGDKKYSIGLDIGTNSVGWAVITDEYKVPSKKFKVLGNTDRHSIKKNLIGALLFDSGETAEATRLKRTARRRYTRRKNRICYLQEIFSNEMAKVDDSFFHRLEESFLVEEDKKHERHPIFGNIVDEVAYHEKYPTIYHLRKKLVDSTDKADLRLIYLALAHMIKFRGHFLIEGDLNPDNSDVDKLFIQLVQTYNQLFEENPINASGVDAKAILSARLSKSRRLENLIAQLPGEKKNGLFGNLIALSLGLTPNFKSNFDLAEDAKLQLSKDTYDDDLDNLLAQIGDQYADLFLAAKNLSDAILLSDILRVNTEITKAPLSASMIKRYDEHHQDLTLLKALVRQQLPEKYKEIFFDQSKNGYAGYIDGGASQEEFYKFIKPILEKMDGTEELLVKLNREDLLRKQRTFDNGSIPHQIHLGELHAILRRQEDFYPFLKDNREKIEKILTFRIPYYVGPLARGNSRFAWMTRKSEETITPWNFEEVVDKGASAQSFIERMTNFDKNLPNEKVLPKHSLLYEYFTVYNELTKVKYVTEGMRKPAFLSGEQKKAIVDLLFKTNRKVTVKQLKEDYFKKIECFDSVEISGVEDRFNASLGTYHDLLKIIKDKDFLDNEENEDILEDIVLTLTLFEDREMIEERLKTYAHLFDDKVMKQLKRRRYTGWGRLSRKLINGIRDKQSGKTILDFLKSDGFANRNFMQLIHDDSLTFKEDIQKAQVSGQGDSLHEHIANLAGSPAIKKGILQTVKVVDELVKVMGRHKPENIVIEMARENQTTQKGQKNSRERMKRIEEGIKELGSQILKEHPVENTQLQNEKLYLYYLQNGRDMYVDQELDINRLSDYDVDHIVPQSFLKDDSIDNKVLTRSDKARGKSDNVPSEEVVKKMKNYWRQLLNAKLITQRKFDNLTKAERGGLSELDKAGFIKRQLVETRQITKHVAQILDSRMNTKYDENDKLIREVKVITLKSKLVSDFRKDFQFYKVREINNYHHAHDAYLNAVVGTALIKKYPKLESEFVYGDYKVYDVRKMIAKSEQEIGKATAKYFFYSNIMNFFKTEITLANGEIRKRPLIETNGETGEIVWDKGRDFATVRKVLSMPQVNIVKKTEVQTGGFSKESILPKRNSDKLIARKKDWDPKKYGGFDSPTVAYSVLVVAKVEKGKSKKLKSVKELLGITIMERSSFEKNPIDFLEAKGYKEVKKDLIIKLPKYSLFELENGRKRMLASAGELQKGNELALPSKYVNFLYLASHYEKLKGSPEDNEQKQLFVEQHKHYLDEIIEQISEFSKRVILADANLDKVLSAYNKHRDKPIREQAENIIHLFTLTNLGAPAAFKYFDTTIDRKRYTSTKEVLDATLIHQSITGLYETRIDLSQLGGDGGPAPGGGGGSGGTLNLEDEYRLYETSAEPEVSPGSTWLSDFPQAWAETGGMGLAVRQAPLIIPLKATSTPVSIKQYPMSQEAKLGIKPHIQRLLDQGILVPCQSPWNTPLLPVKKPGTNDYRPVQDLREVNKRVEDIHPTVPNPYNLLSGLPPSHRWYTVLDLKDAFFCLRLHPTSQPLFAFEWRDPGMGISGQLTWTRLPQGFKNSPTLFNEALHRDLADFRIQHPDLILLQYVDDILLAATSELDCQQGTRALLLTLGNLGYRASAKKAQLCQKQVKYLGYLLKEGQRWLTEARKETVMGQPTPKTPRQLREFLGKAGFCRLFIPGFAEMAAPLYPLTKPGTLFNWGPDQQKAYQEIKQALLTAPALGLPDLTKPFELFVDEKQGYAKGVLTQKLGPWRRPVAYLSKKLDPVAAGWPPCLRMVAAIAVLRKDAGKLTMGQPLVILAPHAVEALVKQPPDRWLSNARMTHYQAMLLDTDRVQFGPVVALNPATLLPLPEEGAPHDCLEILAETHGTRPDLTDQPIPDADHTWYTDGSSFLQEGQRKAGAAVTTETEVIWARALPAGTSAQRAELIALTQALKMAEGKRLNVYTDSRYAFATAHIHGEIYRRRGWLTSEGREIKNKSEILALLKALFLPKRLSIIHCLGHQKGDSAEARGNRLADQAAREAAIKTPPDTSTLLAGKRTADGSEFEKRTADGSEFESPKKKAKVE

SEQ ID NO: 7033 - protein, 2094 aa, synthetic construct
MPAAKRVKLDGGDKKYSIGLDIGTNSVGWAVITDEYKVPSKKFKVLGNTDRHSIKKNLIGALLFDSGETAEATRLKRTARRRYTRRKNRICYLQEIFSNEMAKVDDSFFHRLEESFLVEEDKKHERHPIFGNIVDEVAYHEKYPTIYHLRKKLVDSTDKADLRLIYLALAHMIKFRGHFLIEGDLNPDNSDVDKLFIQLVQTYNQLFEENPINASGVDAKAILSARLSKSRRLENLIAQLPGEKKNGLFGNLIALSLGLTPNFKSNFDLAEDAKLQLSKDTYDDDLDNLLAQIGDQYADLFLAAKNLSDAILLSDILRVNTEITKAPLSASMIKRYDEHHQDLTLLKALVRQQLPEKYKEIFFDQSKNGYAGYIDGGASQEEFYKFIKPILEKMDGTEELLVKLNREDLLRKQRTFDNGSIPHQIHLGELHAILRRQEDFYPFLKDNREKIEKILTFRIPYYVGPLARGNSRFAWMTRKSEETITPWNFEEVVDKGASAQSFIERMTNFDKNLPNEKVLPKHSLLYEYFTVYNELTKVKYVTEGMRKPAFLSGEQKKAIVDLLFKTNRKVTVKQLKEDYFKKIECFDSVEISGVEDRFNASLGTYHDLLKIIKDKDFLDNEENEDILEDIVLTLTLFEDREMIEERLKTYAHLFDDKVMKQLKRRRYTGWGRLSRKLINGIRDKQSGKTILDFLKSDGFANRNFMQLIHDDSLTFKEDIQKAQVSGQGDSLHEHIANLAGSPAIKKGILQTVKVVDELVKVMGRHKPENIVIEMARENQTTQKGQKNSRERMKRIEEGIKELGSQILKEHPVENTQLQNEKLYLYYLQNGRDMYVDQELDINRLSDYDVDHIVPQSFLKDDSIDNKVLTRSDKARGKSDNVPSEEVVKKMKNYWRQLLNAKLITQRKFDNLTKAERGGLSELDKAGFIKRQLVETRQITKHVAQILDSRMNTKYDENDKLIREVKVITLKSKLVSDFRKDFQFYKVREINNYHHAHDAYLNAVVGTALIKKYPKLESEFVYGDYKVYDVRKMIAKSEQEIGKATAKYFFYSNIMNFFKTEITLANGEIRKRPLIETNGETGEIVWDKGRDFATVRKVLSMPQVNIVKKTEVQTGGFSKESILPKRNSDKLIARKKDWDPKKYGGFDSPTVAYSVLVVAKVEKGKSKKLKSVKELLGITIMERSSFEKNPIDFLEAKGYKEVKKDLIIKLPKYSLFELENGRKRMLASAGELQKGNELALPSKYVNFLYLASHYEKLKGSPEDNEQKQLFVEQHKHYLDEIIEQISEFSKRVILADANLDKVLSAYNKHRDKPIREQAENIIHLFTLTNLGAPAAFKYFDTTIDRKRYTSTKEVLDATLIHQSITGLYETRIDLSQLGGDGGPAPGGGGGSGGTLGIEDEYRLHETSTEPDVSLGSTWLSDFPQAWAETGGMGLAVRQAPLIIPLKATSTPVSIQQYPMSHEARLGIKPHIQRLLDQGILVPCQSPWNTPLLPVKKPGTNDYRPVQDLREVNKRVEDIHPTVPNPYNLLSGLPPSHQWYTVLDLKDAFFCLRLHPTSQPLFAFEWRDPGMGISGQLTWTRLPQGFKNSPTLFNEALHRDLADFRIQHPDLILLQYVDDILLAATSELDCQQGTRALLQTLGDLGYRASAKKAQICQKQVKYLGYLLREGQRWLTEARKETVMGQPVPKTPRQLREFLGTAGFCRLWIPGFAEMAAPLYPLTKPGTLFSWGPDQQKAYQEIKQALLTAPALGLPDLTKPFELFVDEKQGYAKGVLTQKLGPWRRPVAYLSKKLDPVAAGWPPCLRMVAAIAVLTKDAGKLTMGQPLVILAPHAVEALVKQPPDRWLSNARMTHYQAMLLDTDRVQFGPVVALNPATLLPLPEEGAPHDCLEILAETHGTRPDLTDQPIPDADHTWYTDGSSFLQEGQRKAGAAVTTETEVIWAGALPAGTSAQRAELIALTQALKMAEGKRLNVYTDSRYAFATAHIHGEIYRRRGWLTSEGREIKNKSEILALLKALFLPKRLSIIHCLGHQKGDSAEARGNRLADQAAREAAIKTPPDTSTLLAGKRTADGSEFEKRTADGSEFESPKKKAKVE

SEQ ID NO: 7034 - protein, 2094 aa, synthetic construct
MPAAKRVKLDGGDKKYSIGLDIGTNSVGWAVITDEYKVPSKKFKVLGNTDRHSIKKNLIGALLFDSGETAEATRLKRTARRRYTRRKNRICYLQEIFSNEMAKVDDSFFHRLEESFLVEEDKKHERHPIFGNIVDEVAYHEKYPTIYHLRKKLVDSTDKADLRLIYLALAHMIKFRGHFLIEGDLNPDNSDVDKLFIQLVQTYNQLFEENPINASGVDAKAILSARLSKSRRLENLIAQLPGEKKNGLFGNLIALSLGLTPNFKSNFDLAEDAKLQLSKDTYDDDLDNLLAQIGDQYADLFLAAKNLSDAILLSDILRVNTEITKAPLSASMIKRYDEHHQDLTLLKALVRQQLPEKYKEIFFDQSKNGYAGYIDGGASQEEFYKFIKPILEKMDGTEELLVKLNREDLLRKQRTFDNGSIPHQIHLGELHAILRRQEDFYPFLKDNREKIEKILTFRIPYYVGPLARGNSRFAWMTRKSEETITPWNFEEVVDKGASAQSFIERMTNFDKNLPNEKVLPKHSLLYEYFTVYNELTKVKYVTEGMRKPAFLSGEQKKAIVDLLFKTNRKVTVKQLKEDYFKKIECFDSVEISGVEDRFNASLGTYHDLLKIIKDKDFLDNEENEDILEDIVLTLTLFEDREMIEERLKTYAHLFDDKVMKQLKRRRYTGWGRLSRKLINGIRDKQSGKTILDFLKSDGFANRNFMQLIHDDSLTFKEDIQKAQVSGQGDSLHEHIANLAGSPAIKKGILQTVKVVDELVKVMGRHKPENIVIEMARENQTTQKGQKNSRERMKRIEEGIKELGSQILKEHPVENTQLQNEKLYLYYLQNGRDMYVDQELDINRLSDYDVDHIVPQSFLKDDSIDNKVLTRSDKARGKSDNVPSEEVVKKMKNYWRQLLNAKLITQRKFDNLTKAERGGLSELDKAGFIKRQLVETRQITKHVAQILDSRMNTKYDENDKLIREVKVITLKSKLVSDFRKDFQFYKVREINNYHHAHDAYLNAVVGTALIKKYPKLESEFVYGDYKVYDVRKMIAKSEQEIGKATAKYFFYSNIMNFFKTEITLANGEIRKRPLIETNGETGEIVWDKGRDFATVRKVLSMPQVNIVKKTEVQTGGFSKESILPKRNSDKLIARKKDWDPKKYGGFDSPTVAYSVLVVAKVEKGKSKKLKSVKELLGITIMERSSFEKNPIDFLEAKGYKEVKKDLIIKLPKYSLFELENGRKRMLASAGELQKGNELALPSKYVNFLYLASHYEKLKGSPEDNEQKQLFVEQHKHYLDEIIEQISEFSKRVILADANLDKVLSAYNKHRDKPIREQAENIIHLFTLTNLGAPAAFKYFDTTIDRKRYTSTKEVLDATLIHQSITGLYETRIDLSQLGGDGGPAPGGGGGSGGTLNIEDEYRLHETSKEPDVSLGSTWLSDFPQAWAETGGMGLAVRQAPLIIPLKATSTPVSIKQYPMSQEARLGIKPHIQRLLDQGILVPCQSPWNTPLLPVKKPGTNDYRPVQDLREVNKRVEDIHPTVPNPYNLLSGLPPSHQWYTVLDLKDAFFCLRLHPTSQPLFAFEWRDPEMGISGQLTWTRLPQGFKNSPTLFNEALHRDLAGFRIQHPDLILLQYVDDLLLAATSELDCQQGTRALLQTLGDLGYRASAKKAQICQKQVKYLGYLLKEGQRWLTEARKETVMGQPIPKTPRQLREFLGTAGFCRLWIPGFAEMAAPLYPLTKPGTLFNWGPDQQKAFQEIKQALLTAPALGLPDLTKPFELFVDEKQGYAKGVLTQKLGPWRRPVAYLSKKLDPVAAGWPPCLRMVAAIAVLTKDAGKLTMGQPLVILAPHAVEALVKQPPDRWLSNARMTHYQALLLDTDRVQFGPVVALNPATLLPLPEEGLQHDCLDILAEAHGTRSDLMDQPLPDADHTWYTDGSSFLQEGQRKAGAAVTTETEVIWARALPAGTSAQRAELIALTQALKMAEGKKLNVYTDSRYAFATAHIHGEIYRRRGWLTSEGKEIKNKDEILALLKALFLPKRLSIIHCPGHQKGNSAEARGNRMADQAAREVATRETPETSTLLAGKRTADGSEFEKRTADGSEFESPKKKAKVE

SEQ ID NO: 7035 - protein, 2094 aa, synthetic construct
MPAAKRVKLDGGDKKYSIGLDIGTNSVGWAVITDEYKVPSKKFKVLGNTDRHSIKKNLIGALLFDSGETAEATRLKRTARRRYTRRKNRICYLQEIFSNEMAKVDDSFFHRLEESFLVEEDKKHERHPIFGNIVDEVAYHEKYPTIYHLRKKLVDSTDKADLRLIYLALAHMIKFRGHFLIEGDLNPDNSDVDKLFIQLVQTYNQLFEENPINASGVDAKAILSARLSKSRRLENLIAQLPGEKKNGLFGNLIALSLGLTPNFKSNFDLAEDAKLQLSKDTYDDDLDNLLAQIGDQYADLFLAAKNLSDAILLSDILRVNTEITKAPLSASMIKRYDEHHQDLTLLKALVRQQLPEKYKEIFFDQSKNGYAGYIDGGASQEEFYKFIKPILEKMDGTEELLVKLNREDLLRKQRTFDNGSIPHQIHLGELHAILRRQEDFYPFLKDNREKIEKILTFRIPYYVGPLARGNSRFAWMTRKSEETITPWNFEEVVDKGASAQSFIERMTNFDKNLPNEKVLPKHSLLYEYFTVYNELTKVKYVTEGMRKPAFLSGEQKKAIVDLLFKTNRKVTVKQLKEDYFKKIECFDSVEISGVEDRFNASLGTYHDLLKIIKDKDFLDNEENEDILEDIVLTLTLFEDREMIEERLKTYAHLFDDKVMKQLKRRRYTGWGRLSRKLINGIRDKQSGKTILDFLKSDGFANRNFMQLIHDDSLTFKEDIQKAQVSGQGDSLHEHIANLAGSPAIKKGILQTVKVVDELVKVMGRHKPENIVIEMARENQTTQKGQKNSRERMKRIEEGIKELGSQILKEHPVENTQLQNEKLYLYYLQNGRDMYVDQELDINRLSDYDVDHIVPQSFLKDDSIDNKVLTRSDKARGKSDNVPSEEVVKKMKNYWRQLLNAKLITQRKFDNLTKAERGGLSELDKAGFIKRQLVETRQITKHVAQILDSRMNTKYDENDKLIREVKVITLKSKLVSDFRKDFQFYKVREINNYHHAHDAYLNAVVGTALIKKYPKLESEFVYGDYKVYDVRKMIAKSEQEIGKATAKYFFYSNIMNFFKTEITLANGEIRKRPLIETNGETGEIVWDKGRDFATVRKVLSMPQVNIVKKTEVQTGGFSKESILPKRNSDKLIARKKDWDPKKYGGFDSPTVAYSVLVVAKVEKGKSKKLKSVKELLGITIMERSSFEKNPIDFLEAKGYKEVKKDLIIKLPKYSLFELENGRKRMLASAGELQKGNELALPSKYVNFLYLASHYEKLKGSPEDNEQKQLFVEQHKHYLDEIIEQISEFSKRVILADANLDKVLSAYNKHRDKPIREQAENIIHLFTLTNLGAPAAFKYFDTTIDRKRYTSTKEVLDATLIHQSITGLYETRIDLSQLGGDGGPAPGGGGGSGGTLNIEDEYRLHETSKGPDVPLGSTWLSDFPQAWAETGGMGLAVRQAPLIIPLKATSTPVSIKQYPMSQEARLGIKPHIQRLLDQGILVPCQSPWNTPLLPVKKPGTNDYRPVQDLREVNKRVEDIHPTVPNPYNLLSGLPPSHQWYTVLDLKDAFFCLRLHPTSQSLFAFEWRDPEMGISGQLTWTRLPQGFKNSPTLFNEALHRDLADFRIQHPDLILLQYVDDLLLAATSELDCQQGTRALLQTLGDLGYRASAKKAQICQKQVKYLGYLLKEGQRWLTEARKETVMGQPTPKTPRQLREFLGKAGFCRLFIPGFAEMAAPLYPLTKPGTLFEWGPDQQKAYQEIKQALLTAPALGLPDLTKPFELFVDEKQGYAKGVLTQKLGPWRRPVAYLSKKLDPVAAGWPPCLRMVAAIAVLTKDAGKLTMGQPLVILAPHAVEALVKQPPDRWLSNARMTHYQALLLDTDRVQFGPIVALNPATLLPLPEEGLQHDCLDILAEAHGTRPDLTDQPLPDADHTWYTDGSSFLQEGQRKAGAAVTTETEVVWAKALPAGTSAQRAELIALTQALKMAEGKKLNVYTDSRYAFATAHIHGEIYRRRGWLTSEGKEIKNKDEILALLKALFLPKRLSIIHCPGHQKGNRAEARGNRMADQAAREVATRETPETSTLLAGKRTADGSEFEKRTADGSEFESPKKKAKVE

SEQ ID NO: 7036 - protein, 2094 aa, synthetic construct; identical to SEQ ID NO: 4521

SEQ ID NO: 7037 - protein, 2094 aa, synthetic construct
MPAAKRVKLDGGDKKYSIGLDIGTNSVGWAVITDEYKVPSKKFKVLGNTDRHSIKKNLIGALLFDSGETAEATRLKRTARRRYTRRKNRICYLQEIFSNEMAKVDDSFFHRLEESFLVEEDKKHERHPIFGNIVDEVAYHEKYPTIYHLRKKLVDSTDKADLRLIYLALAHMIKFRGHFLIEGDLNPDNSDVDKLFIQLVQTYNQLFEENPINASGVDAKAILSARLSKSRRLENLIAQLPGEKKNGLFGNLIALSLGLTPNFKSNFDLAEDAKLQLSKDTYDDDLDNLLAQIGDQYADLFLAAKNLSDAILLSDILRVNTEITKAPLSASMIKRYDEHHQDLTLLKALVRQQLPEKYKEIFFDQSKNGYAGYIDGGASQEEFYKFIKPILEKMDGTEELLVKLNREDLLRKQRTFDNGSIPHQIHLGELHAILRRQEDFYPFLKDNREKIEKILTFRIPYYVGPLARGNSRFAWMTRKSEETITPWNFEEVVDKGASAQSFIERMTNFDKNLPNEKVLPKHSLLYEYFTVYNELTKVKYVTEGMRKPAFLSGEQKKAIVDLLFKTNRKVTVKQLKEDYFKKIECFDSVEISGVEDRFNASLGTYHDLLKIIKDKDFLDNEENEDILEDIVLTLTLFEDREMIEERLKTYAHLFDDKVMKQLKRRRYTGWGRLSRKLINGIRDKQSGKTILDFLKSDGFANRNFMQLIHDDSLTFKEDIQKAQVSGQGDSLHEHIANLAGSPAIKKGILQTVKVVDELVKVMGRHKPENIVIEMARENQTTQKGQKNSRERMKRIEEGIKELGSQILKEHPVENTQLQNEKLYLYYLQNGRDMYVDQELDINRLSDYDVDHIVPQSFLKDDSIDNKVLTRSDKARGKSDNVPSEEVVKKMKNYWRQLLNAKLITQRKFDNLTKAERGGLSELDKAGFIKRQLVETRQITKHVAQILDSRMNTKYDENDKLIREVKVITLKSKLVSDFRKDFQFYKVREINNYHHAHDAYLNAVVGTALIKKYPKLESEFVYGDYKVYDVRKMIAKSEQEIGKATAKYFFYSNIMNFFKTEITLANGEIRKRPLIETNGETGEIVWDKGRDFATVRKVLSMPQVNIVKKTEVQTGGFSKESILPKRNSDKLIARKKDWDPKKYGGFDSPTVAYSVLVVAKVEKGKSKKLKSVKELLGITIMERSSFEKNPIDFLEAKGYKEVKKDLIIKLPKYSLFELENGRKRMLASAGELQKGNELALPSKYVNFLYLASHYEKLKGSPEDNEQKQLFVEQHKHYLDEIIEQISEFSKRVILADANLDKVLSAYNKHRDKPIREQAENIIHLFTLTNLGAPAAFKYFDTTIDRKRYTSTKEVLDATLIHQSITGLYETRIDLSQLGGDGGPAPGGGGGSGGTLNIEDEHRLHETSKEPDVSLGSTWLSDFPQAWAETGGMGLAVRQAPLIIPLKATSTPVSIKQYPMSQEARLGIKPHIQRLLDQGILVPCQSPWNTPLLPVKKPGTNDYRPVQDLREVNKRVEDIHPTVPNPYNLLSGLPPSHQWYTVLDLKDAFFCLRLHPTSQPLFAFEWRDPEMGISGQLTWTRLPQGFKNSPTLFDEALHRDLADFRIQHPDLILLQYVDDLLLAATSELDCQQGTRALLQTLGNLGYRASAKKAQICQKQVKYLGYLLKEGQRWLTEARKETVMGQPTPKTPRQLREFLGTAGFCRLWIPGFAEMAAPLYPLTKTGTLFNWGPDQQKAYQEIKQALLTAPALGLPDLTKPFELFVDEKQGYAKGVLTQKLGPWRRPVAYLSKKLDPVAAGWPPCLRMVAAIAVLTKDAGKLTMGQPLVILAPHAVEALVKQPPDRWLSNARMTHYQALLLDTDRVQFGPVVALNPATLLPLPEEGLQHNCLDILAEAHGTRPDLTDQPLPDADHTWYTDGSSLLQEGQRKAGAAVTTETEVIWAKALPAGTSAQRAELIALTQALKMAEGKKLNVYTDSRYAFATAHIHGEIYRRRGLLTSEGKEIKNKDEILALLKALFLPKRLSIIHCPGHQKGHSAEARGNRMADQAARKAAITETPDTSTLLAGKRTADGSEFEKRTADGSEFESPKKKAKVE

SEQ ID NO: 7038 - protein, 2094 aa, synthetic construct; identical to SEQ ID NO: 4521

SEQ ID NO: 7039 - protein, 2022 aa, synthetic construct
MPAAKRVKLDGGDKKYSIGLDIGTNSVGWAVITDEYKVPSKKFKVLGNTDRHSIKKNLIGALLFDSGETAEATRLKRTARRRYTRRKNRICYLQEIFSNEMAKVDDSFFHRLEESFLVEEDKKHERHPIFGNIVDEVAYHEKYPTIYHLRKKLVDSTDKADLRLIYLALAHMIKFRGHFLIEGDLNPDNSDVDKLFIQLVQTYNQLFEENPINASGVDAKAILSARLSKSRRLENLIAQLPGEKKNGLFGNLIALSLGLTPNFKSNFDLAEDAKLQLSKDTYDDDLDNLLAQIGDQYADLFLAAKNLSDAILLSDILRVNTEITKAPLSASMIKRYDEHHQDLTLLKALVRQQLPEKYKEIFFDQSKNGYAGYIDGGASQEEFYKFIKPILEKMDGTEELLVKLNREDLLRKQRTFDNGSIPHQIHLGELHAILRRQEDFYPFLKDNREKIEKILTFRIPYYVGPLARGNSRFAWMTRKSEETITPWNFEEVVDKGASAQSFIERMTNFDKNLPNEKVLPKHSLLYEYFTVYNELTKVKYVTEGMRKPAFLSGEQKKAIVDLLFKTNRKVTVKQLKEDYFKKIECFDSVEISGVEDRFNASLGTYHDLLKIIKDKDFLDNEENEDILEDIVLTLTLFEDREMIEERLKTYAHLFDDKVMKQLKRRRYTGWGRLSRKLINGIRDKQSGKTILDFLKSDGFANRNFMQLIHDDSLTFKEDIQKAQVSGQGDSLHEHIANLAGSPAIKKGILQTVKVVDELVKVMGRHKPENIVIEMARENQTTQKGQKNSRERMKRIEEGIKELGSQILKEHPVENTQLQNEKLYLYYLQNGRDMYVDQELDINRLSDYDVDHIVPQSFLKDDSIDNKVLTRSDKARGKSDNVPSEEVVKKMKNYWRQLLNAKLITQRKFDNLTKAERGGLSELDKAGFIKRQLVETRQITKHVAQILDSRMNTKYDENDKLIREVKVITLKSKLVSDFRKDFQFYKVREINNYHHAHDAYLNAVVGTALIKKYPKLESEFVYGDYKVYDVRKMIAKSEQEIGKATAKYFFYSNIMNFFKTEITLANGEIRKRPLIETNGETGEIVWDKGRDFATVRKVLSMPQVNIVKKTEVQTGGFSKESILPKRNSDKLIARKKDWDPKKYGGFDSPTVAYSVLVVAKVEKGKSKKLKSVKELLGITIMERSSFEKNPIDFLEAKGYKEVKKDLIIKLPKYSLFELENGRKRMLASAGELQKGNELALPSKYVNFLYLASHYEKLKGSPEDNEQKQLFVEQHKHYLDEIIEQISEFSKRVILADANLDKVLSAYNKHRDKPIREQAENIIHLFTLTNLGAPAAFKYFDTTIDRKRYTSTKEVLDATLIHQSITGLYETRIDLSQLGGDGGPAPGGGGGSGGGRDIMKDIKVRLMTDSPDDSQDLMIGAIESNLFADQISWKSDQPVWLNQWPLKQEKLQALQQLVTEQLQLGHLEESNSPWNTPVFVIKKKSGKWRLLQDLRAVNATMHDMGALQPGLPSPVAPPKGWEIIIIDLQDCFFNIKLHPEDCKRFAFSVPSPNFKRPYQRFQWKVLPQGMKNSPTLCQKFVDKAILTVRDKYQDSYIVHYMDDILLAHPSRSIVDEILTSMIQALNKHGLVVSTEKIQKYDNLKYLGTHIQGDSVSYQKLQIRTDKLRTLNDFQKLLGNINWIRPFLKLTTGELKPLFEILNPDSNPISTRKLTPEACKALQLMNERLSTARVKRLDLSQPWSLCILKTEYTPTACLWQDGVVEWIHLPHISPKVITPYDIFCTQLIIKGRHRSKELFSKDPDYIVVPYTKVQFDLLLQEKEDWPISLLGFLGEVHFHLPKDPLLTFTLQTAIIFPHMTSTTPLEKGIVIFTDGSANGRSVTYIQGREPIIKENTQNTAQQAEIVAVITAFEEVSQPFNLYTDSKYVTGLFPEIETATLSPRTKIYTELKHLQRLIHKRQEKFYIGHIRGHTGLPGPLAQGNAYADSLTRILTAGKRTADGSEFEKRTADGSEFESPKKKAKVE

SEQ ID NO: 7040 - protein, 2086 aa, synthetic construct
MPAAKRVKLDGGDKKYSIGLDIGTNSVGWAVITDEYKVPSKKFKVLGNTDRHSIKKNLIGALLFDSGETAEATRLKRTARRRYTRRKNRICYLQEIFSNEMAKVDDSFFHRLEESFLVEEDKKHERHPIFGNIVDEVAYHEKYPTIYHLRKKLVDSTDKADLRLIYLALAHMIKFRGHFLIEGDLNPDNSDVDKLFIQLVQTYNQLFEENPINASGVDAKAILSARLSKSRRLENLIAQLPGEKKNGLFGNLIALSLGLTPNFKSNFDLAEDAKLQLSKDTYDDDLDNLLAQIGDQYADLFLAAKNLSDAILLSDILRVNTEITKAPLSASMIKRYDEHHQDLTLLKALVRQQLPEKYKEIFFDQSKNGYAGYIDGGASQEEFYKFIKPILEKMDGTEELLVKLNREDLLRKQRTFDNGSIPHQIHLGELHAILRRQEDFYPFLKDNREKIEKILTFRIPYYVGPLARGNSRFAWMTRKSEETITPWNFEEVVDKGASAQSFIERMTNFDKNLPNEKVLPKHSLLYEYFTVYNELTKVKYVTEGMRKPAFLSGEQKKAIVDLLFKTNRKVTVKQLKEDYFKKIECFDSVEISGVEDRFNASLGTYHDLLKIIKDKDFLDNEENEDILEDIVLTLTLFEDREMIEERLKTYAHLFDDKVMKQLKRRRYTGWGRLSRKLINGIRDKQSGKTILDFLKSDGFANRNFMQLIHDDSLTFKEDIQKAQVSGQGDSLHEHIANLAGSPAIKKGILQTVKVVDELVKVMGRHKPENIVIEMARENQTTQKGQKNSRERMKRIEEGIKELGSQILKEHPVENTQLQNEKLYLYYLQNGRDMYVDQELDINRLSDYDVDHIVPQSFLKDDSIDNKVLTRSDKARGKSDNVPSEEVVKKMKNYWRQLLNAKLITQRKFDNLTKAERGGLSELDKAGFIKRQLVETRQITKHVAQILDSRMNTKYDENDKLIREVKVITLKSKLVSDFRKDFQFYKVREINNYHHAHDAYLNAVVGTALIKKYPKLESEFVYGDYKVYDVRKMIAKSEQEIGKATAKYFFYSNIMNFFKTEITLANGEIRKRPLIETNGETGEIVWDKGRDFATVRKVLSMPQVNIVKKTEVQTGGFSKESILPKRNSDKLIARKKDWDPKKYGGFDSPTVAYSVLVVAKVEKGKSKKLKSVKELLGITIMERSSFEKNPIDFLEAKGYKEVKKDLIIKLPKYSLFELENGRKRMLASAGELQKGNELALPSKYVNFLYLASHYEKLKGSPEDNEQKQLFVEQHKHYLDEIIEQISEFSKRVILADANLDKVLSAYNKHRDKPIREQAENIIHLFTLTNLGAPAAFKYFDTTIDRKRYTSTKEVLDATLIHQSITGLYETRIDLSQLGGDGGPAPGGGGGSGGLDDEYRLYSPLVKPDQNIQFWLEQFPQAWAETAGMGLAKQVPPQVIQLKASATPVSVRQYPLSKEAQEGIRPHVQRLIQQGILVPVQSPWNTPLLPVRKPGTNDYRPVQDLREVNKRVQDIHPTVPNPYNLLCALPPQRSWYTVLDLKDAFFCLRLHPTSQPLFAFEWRDPGTGRTGQLTWTRLPQGFKNSPTIFNEALHRDLANFRIQHPQVTLLQYVDDLLLAGATKQDCLEGTKALLLELSDLGYRASAKKAQICRREVTYLGYSLRDGQRWLTEARKKTVVQIPAPTTAKQVREFLGKAGFCRLFIPGFATLAAPLYPLTKPKGEFSWAPEHQKAFDAIKKALLSAPALALPDVTKPFTLYVDERKGVARGVLTQTLGPWRRPVAYLSKKLDPVASGWPVCLKAIAAVAILVKDADKLTLGQNITVIAPHALENIVRQPPDRWMTNARMTHYQSLLLTERVTFAPPAALNPATLLPEETDEPVTHDCHQLLIEETGVRKDLTDIPLTGEVLTWFTDGSSYVVEGKRMAGAAVVDGTRTIWASSLPEGTSAQKAELMALTQALRLAEGKSINIYTDSRYAFATAHVHGAIYKQRGWLTSAGREIKNKEEILSLLEALHLPKRLAIIHCPGHQKAKDPISRGNQMADRVAKQAAQGVNLLPAGKRTADGSEFEKRTADGSEFESPKKKAKVE

SEQ ID NO: 7041 - protein, 2174 aa, synthetic construct
MPAAKRVKLDGGDKKYSIGLDIGTNSVGWAVITDEYKVPSKKFKVLGNTDRHSIKKNLIGALLFDSGETAEATRLKRTARRRYTRRKNRICYLQEIFSNEMAKVDDSFFHRLEESFLVEEDKKHERHPIFGNIVDEVAYHEKYPTIYHLRKKLVDSTDKADLRLIYLALAHMIKFRGHFLIEGDLNPDNSDVDKLFIQLVQTYNQLFEENPINASGVDAKAILSARLSKSRRLENLIAQLPGEKKNGLFGNLIALSLGLTPNFKSNFDLAEDAKLQLSKDTYDDDLDNLLAQIGDQYADLFLAAKNLSDAILLSDILRVNTEITKAPLSASMIKRYDEHHQDLTLLKALVRQQLPEKYKEIFFDQSKNGYAGYIDGGASQEEFYKFIKPILEKMDGTEELLVKLNREDLLRKQRTFDNGSIPHQIHLGELHAILRRQEDFYPFLKDNREKIEKILTFRIPYYVGPLARGNSRFAWMTRKSEETITPWNFEEVVDKGASAQSFIERMTNFDKNLPNEKVLPKHSLLYEYFTVYNELTKVKYVTEGMRKPAFLSGEQKKAIVDLLFKTNRKVTVKQLKEDYFKKIECFDSVEISGVEDRFNASLGTYHDLLKIIKDKDFLDNEENEDILEDIVLTLTLFEDREMIEERLKTYAHLFDDKVMKQLKRRRYTGWGRLSRKLINGIRDKQSGKTILDFLKSDGFANRNFMQLIHDDSLTFKEDIQKAQVSGQGDSLHEHIANLAGSPAIKKGILQTVKVVDELVKVMGRHKPENIVIEMARENQTTQKGQKNSRERMKRIEEGIKELGSQILKEHPVENTQLQNEKLYLYYLQNGRDMYVDQELDINRLSDYDVDHIVPQSFLKDDSIDNKVLTRSDKARGKSDNVPSEEVVKKMKNYWRQLLNAKLITQRKFDNLTKAERGGLSELDKAGFIKRQLVETRQITKHVAQILDSRMNTKYDENDKLIREVKVITLKSKLVSDFRKDFQFYKVREINNYHHAHDAYLNAVVGTALIKKYPKLESEFVYGDYKVYDVRKMIAKSEQEIGKATAKYFFYSNIMNFFKTEITLANGEIRKRPLIETNGETGEIVWDKGRDFATVRKVLSMPQVNIVKKTEVQTGGFSKESILPKRNSDKLIARKKDWDPKKYGGFDSPTVAYSVLVVAKVEKGKSKKLKSVKELLGITIMERSSFEKNPIDFLEAKGYKEVKKDLIIKLPKYSLFELENGRKRMLASAGELQKGNELALPSKYVNFLYLASHYEKLKGSPEDNEQKQLFVEQHKHYLDEIIEQISEFSKRVILADANLDKVLSAYNKHRDKPIREQAENIIHLFTLTNLGAPAAFKYFDTTIDRKRYTSTKEVLDATLIHQSITGLYETRIDLSQLGGDGGPAPGGGGGSGGMDPLQLLQPLEAEIKGTKLKAHWNSGATITCVPEAFLEDERPIQTMLIKTIHGEKQQDVYYLTFKVQGRKVEAEVLASPYDYILLNPSDVPWLMKKPLQLTVLVPLHEYQERLLQQTALPKEQKELLQKLFLKYDALWQHWENQVGHRRIKPHNIATGTLAPRPQKQYPINPKAKPSIQIVIDDLLKQGVLIQQNSTMNTPVYPVPKPDGKWRMVLDYREVNKTIPLIAAQNQHSAGILSSIYRGKYKTTLDLTNGFWAHPITPESYWLTAFTWQGKQYCWTRLPQGFLNSPALFTADVVDLLKEIPNVQAYVDDIYISHDDPQEHLEQLEKIFSILLNAGYVVSLKKSEIAQREVEFLGFNITKEGRGLTDTFKQKLLNITPPKDLKQLQSILGLLNFARNFIPNYSELVKPLYTIVANANGKFISWTEDNSNQLQHIISVLNQADNLEERNPETRLIIKVNSSPSAGYIRYYNEGSKRPIMYVNYIFSKAEAKFTQTEKLLTTMHKGLIKAMDLAMGQEILVYSPIVSMTKIQRTPLPERKALPVRWITWMTYLEDPRIQFHYDKSLPELQQIPNVTEDVIAKTKHPSEFAMVFYTDGSAIKHPDVNKSHSAGMGIAQVQFIPEYKIVHQWSIPLGDHTAQLAEIAAVEFACKKALKISGPVLIVTDSFYVAESANKELPYWKSNGFLNNKKKPLRHVSKWKSIAECLQLKPDIIIMHEKGHQQPMTTLHTEGNNLADKLATQGSYVVHAGKRTADGSEFEKRTADGSEFESPKKKAKVE

SEQ ID NO: 7042 - protein, 2092 aa, synthetic construct
MPAAKRVKLDGGDKKYSIGLDIGTNSVGWAVITDEYKVPSKKFKVLGNTDRHSIKKNLIGALLFDSGETAEATRLKRTARRRYTRRKNRICYLQEIFSNEMAKVDDSFFHRLEESFLVEEDKKHERHPIFGNIVDEVAYHEKYPTIYHLRKKLVDSTDKADLRLIYLALAHMIKFRGHFLIEGDLNPDNSDVDKLFIQLVQTYNQLFEENPINASGVDAKAILSARLSKSRRLENLIAQLPGEKKNGLFGNLIALSLGLTPNFKSNFDLAEDAKLQLSKDTYDDDLDNLLAQIGDQYADLFLAAKNLSDAILLSDILRVNTEITKAPLSASMIKRYDEHHQDLTLLKALVRQQLPEKYKEIFFDQSKNGYAGYIDGGASQEEFYKFIKPILEKMDGTEELLVKLNREDLLRKQRTFDNGSIPHQIHLGELHAILRRQEDFYPFLKDNREKIEKILTFRIPYYVGPLARGNSRFAWMTRKSEETITPWNFEEVVDKGASAQSFIERMTNFDKNLPNEKVLPKHSLLYEYFTVYNELTKVKYVTEGMRKPAFLSGEQKKAIVDLLFKTNRKVTVKQLKEDYFKKIECFDSVEISGVEDRFNASLGTYHDLLKIIKDKDFLDNEENEDILEDIVLTLTLFEDREMIEERLKTYAHLFDDKVMKQLKRRRYTGWGRLSRKLINGIRDKQSGKTILDFLKSDGFANRNFMQLIHDDSLTFKEDIQKAQVSGQGDSLHEHIANLAGSPAIKKGILQTVKVVDELVKVMGRHKPENIVIEMARENQTTQKGQKNSRERMKRIEEGIKELGSQILKEHPVENTQLQNEKLYLYYLQNGRDMYVDQELDINRLSDYDVDHIVPQSFLKDDSIDNKVLTRSDKARGKSDNVPSEEVVKKMKNYWRQLLNAKLITQRKFDNLTKAERGGLSELDKAGFIKRQLVETRQITKHVAQILDSRMNTKYDENDKLIREVKVITLKSKLVSDFRKDFQFYKVREINNYHHAHDAYLNAVVGTALIKKYPKLESEFVYGDYKVYDVRKMIAKSEQEIGKATAKYFFYSNIMNFFKTEITLANGEIRKRPLIETNGETGEIVWDKGRDFATVRKVLSMPQVNIVKKTEVQTGGFSKESILPKRNSDKLIARKKDWDPKKYGGFDSPTVAYSVLVVAKVEKGKSKKLKSVKELLGITIMERSSFEKNPIDFLEAKGYKEVKKDLIIKLPKYSLFELENGRKRMLASAGELQKGNELALPSKYVNFLYLASHYEKLKGSPEDNEQKQLFVEQHKHYLDEIIEQISEFSKRVILADANLDKVLSAYNKHRDKPIREQAENIIHLFTLTNLGAPAAFKYFDTTIDRKRYTSTKEVLDATLIHQSITGLYETRIDLSQLGGDGGPAPGGGGGSGGVLNLEEEYRLHEKPVPSSIDPSWLQLFPTVWAERAGMGLANQVPPVVVELRSGASPVAVRQYPMSKEAREGIRPHIQRFLDLGVLVPCQSPWNTPLLPVKKPGTNDYRPVQDLREINKRVQDIHPTVPNPYNLLSSLPPSHTWYSVLDLKDAFFCLKLHPNSQPLFAFEWRDPEKGNTGQLTWTRLPQGFKNSPTLFDEALHRDLAPFRALNPQVVLLQYVDDLLVAAPTYRDCKEGTQKLLQELSKLGYRVSAKKAQLCQKEVTYLGYLLKEGKRWLTPARKATVMKIPPPTTPRQVREFLGTAGFCRLWIPGFASLAAPLYPLTKESIPFIWTEEHQKAFDRIKEALLSAPALALPDLTKPFTLYVDERAGVARGVLTQTLGPWRRPVAYLSKKLDPVASGWPTCLKAVAAVALLLKDADKLTLGQNVTVIASHSLESIVRQPPDRWMTNARMTHYQSLLLNERVSFAPPAVLNPATLLPVESEATPVHRCSEILAEETGTRRDLKDQPLPGVPAWYTDGSSFIAEGKRRAGAAIVDGKRTVWASSLPEGTSAQKAELVALTQALRLAEGKDINIYTDSRYAFATAHIHGAIYKQRGLLTSAGKDIKNKEEILALLEAIHLPKRVAIIHCPGHQKGNDPVATGNRRADEAAKQAALSTRVLAETTKPAGKRTADGSEFEKRTADGSEFESPKKKAKVE

SEQ ID NO: 7043 - protein, 2092 aa, synthetic construct
MPAAKRVKLDGGDKKYSIGLDIGTNSVGWAVITDEYKVPSKKFKVLGNTDRHSIKKNLIGALLFDSGETAEATRLKRTARRRYTRRKNRICYLQEIFSNEMAKVDDSFFHRLEESFLVEEDKKHERHPIFGNIVDEVAYHEKYPTIYHLRKKLVDSTDKADLRLIYLALAHMIKFRGHFLIEGDLNPDNSDVDKLFIQLVQTYNQLFEENPINASGVDAKAILSARLSKSRRLENLIAQLPGEKKNGLFGNLIALSLGLTPNFKSNFDLAEDAKLQLSKDTYDDDLDNLLAQIGDQYADLFLAAKNLSDAILLSDILRVNTEITKAPLSASMIKRYDEHHQDLTLLKALVRQQLPEKYKEIFFDQSKNGYAGYIDGGASQEEFYKFIKPILEKMDGTEELLVKLNREDLLRKQRTFDNGSIPHQIHLGELHAILRRQEDFYPFLKDNREKIEKILTFRIPYYVGPLARGNSRFAWMTRKSEETITPWNFEEVVDKGASAQSFIERMTNFDKNLPNEKVLPKHSLLYEYFTVYNELTKVKYVTEGMRKPAFLSGEQKKAIVDLLFKTNRKVTVKQLKEDYFKKIECFDSVEISGVEDRFNASLGTYHDLLKIIKDKDFLDNEENEDILEDIVLTLTLFEDREMIEERLKTYAHLFDDKVMKQLKRRRYTGWGRLSRKLINGIRDKQSGKTILDFLKSDGFANRNFMQLIHDDSLTFKEDIQKAQVSGQGDSLHEHIANLAGSPAIKKGILQTVKVVDELVKVMGRHKPENIVIEMARENQTTQKGQKNSRERMKRIEEGIKELGSQILKEHPVENTQLQNEKLYLYYLQNGRDMYVDQELDINRLSDYDVDHIVPQSFLKDDSIDNKVLTRSDKARGKSDNVPSEEVVKKMKNYWRQLLNAKLITQRKFDNLTKAERGGLSELDKAGFIKRQLVETRQITKHVAQILDSRMNTKYDENDKLIREVKVITLKSKLVSDFRKDFQFYKVREINNYHHAHDAYLNAVVGTALIKKYPKLESEFVYGDYKVYDVRKMIAKSEQEIGKATAKYFFYSNIMNFFKTEITLANGEIRKRPLIETNGETGEIVWDKGRDFATVRKVLSMPQVNIVKKTEVQTGGFSKESILPKRNSDKLIARKKDWDPKKYGGFDSPTVAYSVLVVAKVEKGKSKKLKSVKELLGITIMERSSFEKNPIDFLEAKGYKEVKKDLIIKLPKYSLFELENGRKRMLASAGELQKGNELALPSKYVNFLYLASHYEKLKGSPEDNEQKQLFVEQHKHYLDEIIEQISEFSKRVILADANLDKVLSAYNKHRDKPIREQAENIIHLFTLTNLGAPAAFKYFDTTIDRKRYTSTKEVLDATLIHQSITGLYETRIDLSQLGGDGGPAPGGGGGSGGVLNLEEEYRLHEKPVPSSIDPSWLQLFPTVWAERAGMGLANQVPPVVVELRSGASPVAVRQYPMSKEAREGIRPHIQRFLDLGVLVPCQSPWNTPLLPVKKPGTNDYRPVQDLREINKRVQDIHPTVPNPYNLLSSLPPSHTWYSVLDLKDAFFCLKLHPNSQPLFAFEWRDPEKGNTGQLTWTRLPQGFKNSPTLFNEALHRDLAPFRALNPQVVLLQYVDDLLVAAPTYRDCKEGTQKLLQELSKLGYRVSAKKAQLCQKEVTYLGYLLKEGKRWLTPARKATVMKIPPPTTPRQVREFLGKAGFCRLFIPGFASLAAPLYPLTKPSIPFIWTEEHQKAFDRIKEALLSAPALALPDLTKPFTLYVDERAGVARGVLTQTLGPWRRPVAYLSKKLDPVASGWPTCLKAVAAVALLLKDADKLTLGQNVTVIASHSLESIVRQPPDRWMTNARMTHYQSLLLNERVSFAPPAVLNPATLLPVESEATPVHRCSEILAEETGTRRDLKDQPLPGVPAWYTDGSSFIAEGKRRAGAAIVDGKRTVWASSLPEGTSAQKAELVALTQALRLAEGKDINIYTDSRYAFATAHIHGAIYKQRGWLTSAGKDIKNKEEILALLEAIHLPKRVAIIHCPGHQKGNDPVATGNRRADEAAKQAALSTRVLAETTKPAGKRTADGSEFEKRTADGSEFESPKKKAKVE

SEQ ID NO: 7044 - protein, 2094 aa, synthetic construct
MPAAKRVKLDGGDKKYSIGLDIGTNSVGWAVITDEYKVPSKKFKVLGNTDRHSIKKNLIGALLFDSGETAEATRLKRTARRRYTRRKNRICYLQEIFSNEMAKVDDSFFHRLEESFLVEEDKKHERHPIFGNIVDEVAYHEKYPTIYHLRKKLVDSTDKADLRLIYLALAHMIKFRGHFLIEGDLNPDNSDVDKLFIQLVQTYNQLFEENPINASGVDAKAILSARLSKSRRLENLIAQLPGEKKNGLFGNLIALSLGLTPNFKSNFDLAEDAKLQLSKDTYDDDLDNLLAQIGDQYADLFLAAKNLSDAILLSDILRVNTEITKAPLSASMIKRYDEHHQDLTLLKALVRQQLPEKYKEIFFDQSKNGYAGYIDGGASQEEFYKFIKPILEKMDGTEELLVKLNREDLLRKQRTFDNGSIPHQIHLGELHAILRRQEDFYPFLKDNREKIEKILTFRIPYYVGPLARGNSRFAWMTRKSEETITPWNFEEVVDKGASAQSFIERMTNFDKNLPNEKVLPKHSLLYEYFTVYNELTKVKYVTEGMRKPAFLSGEQKKAIVDLLFKTNRKVTVKQLKEDYFKKIECFDSVEISGVEDRFNASLGTYHDLLKIIKDKDFLDNEENEDILEDIVLTLTLFEDREMIEERLKTYAHLFDDKVMKQLKRRRYTGWGRLSRKLINGIRDKQSGKTILDFLKSDGFANRNFMQLIHDDSLTFKEDIQKAQVSGQGDSLHEHIANLAGSPAIKKGILQTVKVVDELVKVMGRHKPENIVIEMARENQTTQKGQKNSRERMKRIEEGIKELGSQILKEHPVENTQLQNEKLYLYYLQNGRDMYVDQELDINRLSDYDVDHIVPQSFLKDDSIDNKVLTRSDKARGKSDNVPSEEVVKKMKNYWRQLLNAKLITQRKFDNLTKAERGGLSELDKAGFIKRQLVETRQITKHVAQILDSRMNTKYDENDKLIREVKVITLKSKLVSDFRKDFQFYKVREINNYHHAHDAYLNAVVGTALIKKYPKLESEFVYGDYKVYDVRKMIAKSEQEIGKATAKYFFYSNIMNFFKTEITLANGEIRKRPLIETNGETGEIVWDKGRDFATVRKVLSMPQVNIVKKTEVQTGGFSKESILPKRNSDKLIARKKDWDPKKYGGFDSPTVAYSVLVVAKVEKGKSKKLKSVKELLGITIMERSSFEKNPIDFLEAKGYKEVKKDLIIKLPKYSLFELENGRKRMLASAGELQKGNELALPSKYVNFLYLASHYEKLKGSPEDNEQKQLFVEQHKHYLDEIIEQISEFSKRVILADANLDKVLSAYNKHRDKPIREQAENIIHLFTLTNLGAPAAFKYFDTTIDRKRYTSTKEVLDATLIHQSITGLYETRIDLSQLGGDGGPAPGGGGGSGGTLNIEDEYRLHETSKEPDVPLGSTWLSDFPQAWAETGGMGLAVRQAPLIIPLKATSTPVSIKQYPMSQEARLGIKPHIQRLLDQGILVPCQSPWNTPLLPVKKPGTNDYRPVQDLREVNKRVEDIHPTVPNPYNLLSGLPPSHQWYTVLDLKDAFFCLRLHPTSQPLFAFEWRDPEMGISGQLTWTRLPQGFKNSPTLFNEALHRDLADFRIQHPDLILLQYVDDLLLAATSEQDCQRGTRALLQTLGNLGYRASAKKAQICQKQVKYLGYLLKEGQRWLTEARKETVMGQPTPKTPRQLREFLGTAGFCRLWIPGFAEMAAPLYPLTKPGTLFNWGPDQQKAYQEIKQALLTAPALGLPDLTKPFELFVDEKQGYAKGVLTQKLGPWRRPVAYLSKKLDPVAAGWPPCLRMVAAIAVLTKDAGKLTMGQPLVILAPHAVEALVKQPPDRWLSNARMTHYQAMLLDTDRVQFGPVVALNPATLLPLPEKEAPHDCLEILAETHGTRPDLTDQPIPDADYTWYTDGSSFLQEGQRRAGAAVTTETEVIWARALPAGTSAQRAELIALTQALKMAEGKKLNVYTDSRYAFATAHVHGEIYRRRGWLTSEGREIKNKNEILALLKALFLPKRLSIIHCPGHQKGNSAEARGNRMADQAAREAAMKAVLETSTLLAGKRTADGSEFEKRTADGSEFESPKKKAKVE

SEQ ID NO: 7045 - protein, 2098 aa, synthetic construct
MPAAKRVKLDGGDKKYSIGLDIGTNSVGWAVITDEYKVPSKKFKVLGNTDRHSIKKNLIGALLFDSGETAEATRLKRTARRRYTRRKNRICYLQEIFSNEMAKVDDSFFHRLEESFLVEEDKKHERHPIFGNIVDEVAYHEKYPTIYHLRKKLVDSTDKADLRLIYLALAHMIKFRGHFLIEGDLNPDNSDVDKLFIQLVQTYNQLFEENPINASGVDAKAILSARLSKSRRLENLIAQLPGEKKNGLFGNLIALSLGLTPNFKSNFDLAEDAKLQLSKDTYDDDLDNLLAQIGDQYADLFLAAKNLSDAILLSDILRVNTEITKAPLSASMIKRYDEHHQDLTLLKALVRQQLPEKYKEIFFDQSKNGYAGYIDGGASQEEFYKFIKPILEKMDGTEELLVKLNREDLLRKQRTFDNGSIPHQIHLGELHAILRRQEDFYPFLKDNREKIEKILTFRIPYYVGPLARGNSRFAWMTRKSEETITPWNFEEVVDKGASAQSFIERMTNFDKNLPNEKVLPKHSLLYEYFTVYNELTKVKYVTEGMRKPAFLSGEQKKAIVDLLFKTNRKVTVKQLKEDYFKKIECFDSVEISGVEDRFNASLGTYHDLLKIIKDKDFLDNEENEDILEDIVLTLTLFEDREMIEERLKTYAHLFDDKVMKQLKRRRYTGWGRLSRKLINGIRDKQSGKTILDFLKSDGFANRNFMQLIHDDSLTFKEDIQKAQVSGQGDSLHEHIANLAGSPAIKKGILQTVKVVDELVKVMGRHKPENIVIEMARENQTTQKGQKNSRERMKRIEEGIKELGSQILKEHPVENTQLQNEKLYLYYLQNGRDMYVDQELDINRLSDYDVDHIVPQSFLKDDSIDNKVLTRSDKARGKSDNVPSEEVVKKMKNYWRQLLNAKLITQRKFDNLTKAERGGLSELDKAGFIKRQLVETRQITKHVAQILDSRMNTKYDENDKLIREVKVITLKSKLVSDFRKDFQFYKVREINNYHHAHDAYLNAVVGTALIKKYPKLESEFVYGDYKVYDVRKMIAKSEQEIGKATAKYFFYSNIMNFFKTEITLANGEIRKRPLIETNGETGEIVWDKGRDFATVRKVLSMPQVNIVKKTEVQTGGFSKESILPKRNSDKLIARKKDWDPKKYGGFDSPTVAYSVLVVAKVEKGKSKKLKSVKELLGITIMERSSFEKNPIDFLEAKGYKEVKKDLIIKLPKYSLFELENGRKRMLASAGELQKGNELALPSKYVNFLYLASHYEKLKGSPEDNEQKQLFVEQHKHYLDEIIEQISEFSKRVILADANLDKVLSAYNKHRDKPIREQAENIIHLFTLTNLGAPAAFKYFDTTIDRKRYTSTKEVLDATLIHQSITGLYETRIDLSQLGGDGGGGSGSSEAAAKGGTAPLEEEYRLFLEAPIQNVTLLEQWKREIPKVWAEINPPGLASTQAPIHVQLLSTALPVRVRQYPITLEAKRSLRETIRKFRAAGILRPVHSPWNTPLLPVRKSGTSEYRMVQDLREVNKRVETIHPTVPNPYTLLSLLPPDRIWYSVLDLKDAFFCIPLAPESQLIFAFEWADAEEGESGQLTWTRLPQGFKNSPTLFNEALNRDLQGFRLDHPSVSLLQYVDDLLIAADTQAACLSATRDLLMTLAELGYRVSGKKAQLCQEEVTYLGFKIHKGSRSLSNSRTQAILQIPVPKTKRQVREFLGTIGYCRLWIPGFAELAQPLYAATRPGNDPLVWGEKEEEAFQSLKLALTQPPALALPSLDKPFQLFVEETSGAAKGVLTQALGPWKRPVAYLSKRLDPVAAGWPRCLRAIAAAALLTREASKLTFGQDIEITSSHNLESLLRSPPDKWLTNARITQYQVLLLDPPRVRFKQTAALNPATLLPETDDTLPIHHCLDTLDSLTSTRPDLTDQPLAQAEATLFTDGSSYIRDGKRYAGAAVVTLDSVIWAEPLPIGTSAQKAELIALTKALEWSKDKSVNIYTDSRYAFATLHVHGMIYRERGWLTAGGKAIKNAPEILALLTAVWLPKRVAVMHCKGHQKDDAPTSTGNRRADEVAREVAIRPLSTQATISAGKRTADGSEFEKRTADGSEFESPKKKAKVE

SEQ ID NO: 7046 - protein, 2098 aa, synthetic construct
MPAAKRVKLDGGDKKYSIGLDIGTNSVGWAVITDEYKVPSKKFKVLGNTDRHSIKKNLIGALLFDSGETAEATRLKRTARRRYTRRKNRICYLQEIFSNEMAKVDDSFFHRLEESFLVEEDKKHERHPIFGNIVDEVAYHEKYPTIYHLRKKLVDSTDKADLRLIYLALAHMIKFRGHFLIEGDLNPDNSDVDKLFIQLVQTYNQLFEENPINASGVDAKAILSARLSKSRRLENLIAQLPGEKKNGLFGNLIALSLGLTPNFKSNFDLAEDAKLQLSKDTYDDDLDNLLAQIGDQYADLFLAAKNLSDAILLSDILRVNTEITKAPLSASMIKRYDEHHQDLTLLKALVRQQLPEKYKEIFFDQSKNGYAGYIDGGASQEEFYKFIKPILEKMDGTEELLVKLNREDLLRKQRTFDNGSIPHQIHLGELHAILRRQEDFYPFLKDNREKIEKILTFRIPYYVGPLARGNSRFAWMTRKSEETITPWNFEEVVDKGASAQSFIERMTNFDKNLPNEKVLPKHSLLYEYFTVYNELTKVKYVTEGMRKPAFLSGEQKKAIVDLLFKTNRKVTVKQLKEDYFKKIECFDSVEISGVEDRFNASLGTYHDLLKIIKDKDFLDNEENEDILEDIVLTLTLFEDREMIEERLKTYAHLFDDKVMKQLKRRRYTGWGRLSRKLINGIRDKQSGKTILDFLKSDGFANRNFMQLIHDDSLTFKEDIQKAQVSGQGDSLHEHIANLAGSPAIKKGILQTVKVVDELVKVMGRHKPENIVIEMARENQTTQKGQKNSRERMKRIEEGIKELGSQILKEHPVENTQLQNEKLYLYYLQNGRDMYVDQELDINRLSDYDVDHIVPQSFLKDDSIDNKVLTRSDKARGKSDNVPSEEVVKKMKNYWRQLLNAKLITQRKFDNLTKAERGGLSELDKAGFIKRQLVETRQITKHVAQILDSRMNTKYDENDKLIREVKVITLKSKLVSDFRKDFQFYKVREINNYHHAHDAYLNAVVGTALIKKYPKLESEFVYGDYKVYDVRKMIAKSEQEIGKATAKYFFYSNIMNFFKTEITLANGEIRKRPLIETNGETGEIVWDKGRDFATVRKVLSMPQVNIVKKTEVQTGGFSKESILPKRNSDKLIARKKDWDPKKYGGFDSPTVAYSVLVVAKVEKGKSKKLKSVKELLGITIMERSSFEKNPIDFLEAKGYKEVKKDLIIKLPKYSLFELENGRKRMLASAGELQKGNELALPSKYVNFLYLASHYEKLKGSPEDNEQKQLFVEQHKHYLDEIIEQISEFSKRVILADANLDKVLSAYNKHRDKPIREQAENIIHLFTLTNLGAPAAFKYFDTTIDRKRYTSTKEVLDATLIHQSITGLYETRIDLSQLGGDGGGGSGSSEAAAKGGTAPLEEEYRLFLEAPIQNVTLLEQWKREIPKVWAEINPPGLASTQAPIHVQLLSTALPVRVRQYPITLEAKRSLRETIRKFRAAGILRPVHSPWNTPLLPVRKSGTSEYRMVQDLREVNKRVETIHPTVPNPYTLLSLLPPDRIWYSVLDLKDAFFCIPLAPESQLIFAFEWADAEEGESGQLTWTRLPQGFKNSPTLFNEALNRDLQGFRLDHPSVSLLQYVDDLLIAADTQAACLSATRDLLMTLAELGYRVSGKKAQLCQEEVTYLGFKIHKGSRSLSNSRTQAILQIPVPKTKRQVREFLGKIGYCRLFIPGFAELAQPLYAATRPGNDPLVWGEKEEEAFQSLKLALTQPPALALPSLDKPFQLFVEETSGAAKGVLTQALGPWKRPVAYLSKRLDPVAAGWPRCLRAIAAAALLTREASKLTFGQDIEITSSHNLESLLRSPPDKWLTNARITQYQVLLLDPPRVRFKQTAALNPATLLPETDDTLPIHHCLDTLDSLTSTRPDLTDQPLAQAEATLFTDGSSYIRDGKRYAGAAVVTLDSVIWAEPLPIGTSAQKAELIALTKALEWSKDKSVNIYTDSRYAFATLHVHGMIYRERGWLTAGGKAIKNAPEILALLTAVWLPKRVAVMHCKGHQKDDAPTSTGNRRADEVAREVAIRPLSTQATISAGKRTADGSEFEKRTADGSEFESPKKKAKVE

SEQ ID NO: 7047 - protein, 2218 aa, synthetic construct
MPAAKRVKLDGGDKKYSIGLDIGTNSVGWAVITDEYKVPSKKFKVLGNTDRHSIKKNLIGALLFDSGETAEATRLKRTARRRYTRRKNRICYLQEIFSNEMAKVDDSFFHRLEESFLVEEDKKHERHPIFGNIVDEVAYHEKYPTIYHLRKKLVDSTDKADLRLIYLALAHMIKFRGHFLIEGDLNPDNSDVDKLFIQLVQTYNQLFEENPINASGVDAKAILSARLSKSRRLENLIAQLPGEKKNGLFGNLIALSLGLTPNFKSNFDLAEDAKLQLSKDTYDDDLDNLLAQIGDQYADLFLAAKNLSDAILLSDILRVNTEITKAPLSASMIKRYDEHHQDLTLLKALVRQQLPEKYKEIFFDQSKNGYAGYIDGGASQEEFYKFIKPILEKMDGTEELLVKLNREDLLRKQRTFDNGSIPHQIHLGELHAILRRQEDFYPFLKDNREKIEKILTFRIPYYVGPLARGNSRFAWMTRKSEETITPWNFEEVVDKGASAQSFIERMTNFDKNLPNEKVLPKHSLLYEYFTVYNELTKVKYVTEGMRKPAFLSGEQKKAIVDLLFKTNRKVTVKQLKEDYFKKIECFDSVEISGVEDRFNASLGTYHDLLKIIKDKDFLDNEENEDILEDIVLTLTLFEDREMIEERLKTYAHLFDDKVMKQLKRRRYTGWGRLSRKLINGIRDKQSGKTILDFLKSDGFANRNFMQLIHDDSLTFKEDIQKAQVSGQGDSLHEHIANLAGSPAIKKGILQTVKVVDELVKVMGRHKPENIVIEMARENQTTQKGQKNSRERMKRIEEGIKELGSQILKEHPVENTQLQNEKLYLYYLQNGRDMYVDQELDINRLSDYDVDHIVPQSFLKDDSIDNKVLTRSDKARGKSDNVPSEEVVKKMKNYWRQLLNAKLITQRKFDNLTKAERGGLSELDKAGFIKRQLVETRQITKHVAQILDSRMNTKYDENDKLIREVKVITLKSKLVSDFRKDFQFYKVREINNYHHAHDAYLNAVVGTALIKKYPKLESEFVYGDYKVYDVRKMIAKSEQEIGKATAKYFFYSNIMNFFKTEITLANGEIRKRPLIETNGETGEIVWDKGRDFATVRKVLSMPQVNIVKKTEVQTGGFSKESILPKRNSDKLIARKKDWDPKKYGGFDSPTVAYSVLVVAKVEKGKSKKLKSVKELLGITIMERSSFEKNPIDFLEAKGYKEVKKDLIIKLPKYSLFELENGRKRMLASAGELQKGNELALPSKYVNFLYLASHYEKLKGSPEDNEQKQLFVEQHKHYLDEIIEQISEFSKRVILADANLDKVLSAYNKHRDKPIREQAENIIHLFTLTNLGAPAAFKYFDTTIDRKRYTSTKEVLDATLIHQSITGLYETRIDLSQLGGDGGGGSGSSEAAAKGGTLGDQGSRGSDPLPEPRVTLTVEGIPTEFLVNTGAEHSVLTKPMGKMGSKRTVVAGATGSKVYPWTTKRLLKIGQKQVTHSFLVIPECPAPLLGRDLLTKLKAQIQFSTEGPQVTWEDRPAMCLVLNLEEEYRLHEKPVPPSIDPSWLQLFPMVWAEKAGMGLANQVPPVVVELKSDASPVAVRQYPMSKEAREGIRPHIQRFLDLGILVPCQSPWNTPLLPVKKPGTNDYRPVQDLREVNKRVQDIHPTVPNPYNLLSSLPPSHTWYSVLDLKDAFFCLKLHPNSQPLFAFEWRDPEKGNTGQLTWTRLPQGFKNSPTLFDEALHRDLASFRALNPQVVMLQYVDDLLVAAPTYRDCKEGTRRLLQELSKLGYRVSAKKAQLCREEVTYLGYLLKGGKRWLTPARKATVMKIPTPTTPRQVREFLGTAGFCRLWIPGFASLAAPLYPLTREKVPFTWTEAHQEAFGRIKEALLSAPALALPDLTKPFALYVDEKEGVARGVLTQTLGPWRRPVAYLSKKLDPVASGWPTCLKAIAAVALLLKDADKLTLGQNVLVIAPHNLESIVRQPPDRWMTNARMTHYQSLLLNERVSFAPPAILNPATLLPVESDDTPIHICSEILAEETGTRPDLRDQPLPGVPAWYTDGSSFIMDGRRQAGAAIVDNKRTVWASNLPEGTSAQKAELIALTQALRLAEGKSINIYTDSRYAFATAHVHGAIYKQRGLLTSAGKDIKNKEEILALLEAIHLPKRVAIIHCPGHQRGTDPVATGNRKADEAAKQAAQSTRILTETTKNAGKRTADGSEFEKRTADGSEFESPKKKAKVE

SEQ ID NO: 7048 - protein, 2096 aa, synthetic construct
MPAAKRVKLDGGDKKYSIGLDIGTNSVGWAVITDEYKVPSKKFKVLGNTDRHSIKKNLIGALLFDSGETAEATRLKRTARRRYTRRKNRICYLQEIFSNEMAKVDDSFFHRLEESFLVEEDKKHERHPIFGNIVDEVAYHEKYPTIYHLRKKLVDSTDKADLRLIYLALAHMIKFRGHFLIEGDLNPDNSDVDKLFIQLVQTYNQLFEENPINASGVDAKAILSARLSKSRRLENLIAQLPGEKKNGLFGNLIALSLGLTPNFKSNFDLAEDAKLQLSKDTYDDDLDNLLAQIGDQYADLFLAAKNLSDAILLSDILRVNTEITKAPLSASMIKRYDEHHQDLTLLKALVRQQLPEKYKEIFFDQSKNGYAGYIDGGASQEEFYKFIKPILEKMDGTEELLVKLNREDLLRKQRTFDNGSIPHQIHLGELHAILRRQEDFYPFLKDNREKIEKILTFRIPYYVGPLARGNSRFAWMTRKSEETITPWNFEEVVDKGASAQSFIERMTNFDKNLPNEKVLPKHSLLYEYFTVYNELTKVKYVTEGMRKPAFLSGEQKKAIVDLLFKTNRKVTVKQLKEDYFKKIECFDSVEISGVEDRFNASLGTYHDLLKIIKDKDFLDNEENEDILEDIVLTLTLFEDREMIEERLKTYAHLFDDKVMKQLKRRRYTGWGRLSRKLINGIRDKQSGKTILDFLKSDGFANRNFMQLIHDDSLTFKEDIQKAQVSGQGDSLHEHIANLAGSPAIKKGILQTVKVVDELVKVMGRHKPENIVIEMARENQTTQKGQKNSRERMKRIEEGIKELGSQILKEHPVENTQLQNEKLYLYYLQNGRDMYVDQELDINRLSDYDVDHIVPQSFLKDDSIDNKVLTRSDKARGKSDNVPSEEVVKKMKNYWRQLLNAKLITQRKFDNLTKAERGGLSELDKAGFIKRQLVETRQITKHVAQILDSRMNTKYDENDKLIREVKVITLKSKLVSDFRKDFQFYKVREINNYHHAHDAYLNAVVGTALIKKYPKLESEFVYGDYKVYDVRKMIAKSEQEIGKATAKYFFYSNIMNFFKTEITLANGEIRKRPLIETNGETGEIVWDKGRDFATVRKVLSMPQVNIVKKTEVQTGGFSKESILPKRNSDKLIARKKDWDPKKYGGFDSPTVAYSVLVVAKVEKGKSKKLKSVKELLGITIMERSSFEKNPIDFLEAKGYKEVKKDLIIKLPKYSLFELENGRKRMLASAGELQKGNELALPSKYVNFLYLASHYEKLKGSPEDNEQKQLFVEQHKHYLDEIIEQISEFSKRVILADANLDKVLSAYNKHRDKPIREQAENIIHLFTLTNLGAPAAFKYFDTTIDRKRYTSTKEVLDATLIHQSITGLYETRIDLSQLGGDGGGGSGSSEAAAKGGTLGIEDEYRLHETSTEPDVSLGSTWLSDFPQAWAETGGMGLAVRQAPLIIPLKATSTPVSIQQYPMSHEARLGIKPHIQRLLDQGILVPCQSPWNTPLLPVKKPGTNDYRPVQDLREVNKRVEDIHPTVPNPYNLLSGLPPSHQWYTVLDLKDAFFCLRLHPTSQPLFAFEWRDPGMGISGQLTWTRLPQGFKNSPTLFNEALHRDLADFRIQHPDLILLQYVDDILLAATSELDCQQGTRALLQTLGDLGYRASAKKAQICQKQVKYLGYLLREGQRWLTEARKETVMGQPVPKTPRQLREFLGTAGFCRLWIPGFAEMAAPLYPLTKPGTLFSWGPDQQKAYQEIKQALLTAPALGLPDLTKPFELFVDEKQGYAKGVLTQKLGPWRRPVAYLSKKLDPVAAGWPPCLRMVAAIAVLTKDAGKLTMGQPLVILAPHAVEALVKQPPDRWLSNARMTHYQAMLLDTDRVQFGPVVALNPATLLPLPEEGAPHDCLEILAETHGTRPDLTDQPIPDADHTWYTDGSSFLQEGQRKAGAAVTTETEVIWAGALPAGTSAQRAELIALTQALKMAEGKRLNVYTDSRYAFATAHIHGEIYRRRGWLTSEGREIKNKSEILALLKALFLPKRLSIIHCLGHQKGDSAEARGNRLADQAAREAAIKTPPDTSTLLAGKRTADGSEFEKRTADGSEFESPKKKAKVE

SEQ ID NO: 7049 - protein, 2096 aa, synthetic construct
MPAAKRVKLDGGDKKYSIGLDIGTNSVGWAVITDEYKVPSKKFKVLGNTDRHSIKKNLIGALLFDSGETAEATRLKRTARRRYTRRKNRICYLQEIFSNEMAKVDDSFFHRLEESFLVEEDKKHERHPIFGNIVDEVAYHEKYPTIYHLRKKLVDSTDKADLRLIYLALAHMIKFRGHFLIEGDLNPDNSDVDKLFIQLVQTYNQLFEENPINASGVDAKAILSARLSKSRRLENLIAQLPGEKKNGLFGNLIALSLGLTPNFKSNFDLAEDAKLQLSKDTYDDDLDNLLAQIGDQYADLFLAAKNLSDAILLSDILRVNTEITKAPLSASMIKRYDEHHQDLTLLKALVRQQLPEKYKEIFFDQSKNGYAGYIDGGASQEEFYKFIKPILEKMDGTEELLVKLNREDLLRKQRTFDNGSIPHQIHLGELHAILRRQEDFYPFLKDNREKIEKILTFRIPYYVGPLARGNSRFAWMTRKSEETITPWNFEEVVDKGASAQSFIERMTNFDKNLPNEKVLPKHSLLYEYFTVYNELTKVKYVTEGMRKPAFLSGEQKKAIVDLLFKTNRKVTVKQLKEDYFKKIECFDSVEISGVEDRFNASLGTYHDLLKIIKDKDFLDNEENEDILEDIVLTLTLFEDREMIEERLKTYAHLFDDKVMKQLKRRRYTGWGRLSRKLINGIRDKQSGKTILDFLKSDGFANRNFMQLIHDDSLTFKEDIQKAQVSGQGDSLHEHIANLAGSPAIKKGILQTVKVVDELVKVMGRHKPENIVIEMARENQTTQKGQKNSRERMKRIEEGIKELGSQILKEHPVENTQLQNEKLYLYYLQNGRDMYVDQELDINRLSDYDVDHIVPQSFLKDDSIDNKVLTRSDKARGKSDNVPSEEVVKKMKNYWRQLLNAKLITQRKFDNLTKAERGGLSELDKAGFIKRQLVETRQITKHVAQILDSRMNTKYDENDKLIREVKVITLKSKLVSDFRKDFQFYKVREINNYHHAHDAYLNAVVGTALIKKYPKLESEFVYGDYKVYDVRKMIAKSEQEIGKATAKYFFYSNIMNFFKTEITLANGEIRKRPLIETNGETGEIVWDKGRDFATVRKVLSMPQVNIVKKTEVQTGGFSKESILPKRNSDKLIARKKDWDPKKYGGFDSPTVAYSVLVVAKVEKGKSKKLKSVKELLGITIMERSSFEKNPIDFLEAKGYKEVKKDLIIKLPKYSLFELENGRKRMLASAGELQKGNELALPSKYVNFLYLASHYEKLKGSPEDNEQKQLFVEQHKHYLDEIIEQISEFSKRVILADANLDKVLSAYNKHRDKPIREQAENIIHLFTLTNLGAPAAFKYFDTTIDRKRYTSTKEVLDATLIHQSITGLYETRIDLSQLGGDGGGGSGSSEAAAKGGTLNIEDEYRLHEISTEPDVSPGSTWLSDFPQAWAETGGMGLAVRQAPLIIPLKATSTPVSIKQYPMSQEAKLGIKPHIQRLLDQGILVPCQSPWNTPLLPVKKPGTNDYRPVQGLREVNKRVEDIHPTVPNPYNLLSGLPTSHRWYTVLDLKDAFFCLRLHPTSQPLFASEWRDPGMGISGQLTWTRLPQGFKNSPTLFNEALHRGLADFRIQHPDLILLQYVDDLLLAATSELDCQQGTRALLKTLGNLGYRASAKKAQICQKQVKYLGYLLREGQRWLTEARKETVMGQPTPKTPRQLREFLGKAGFCRLFIPRFAEMAAPLYPLTKPGTLFNWGPDQQKAYHEIKQALLTAPALGLPDLTKPFELFVDEKQGYAKGVLTQKLGPWRRPVAYLSKKLDPVAAGWPPCLRMVAAIAVLTKDAGKLTMGQPLVILAPHAVEALVKQPPDRWLSNARMTHYQAMLLDTDRVQFGPVVALNPATLLPLPEEGAPHDCLEILAETHGTEPDLTDQPIPDADHTWYTDGSSFLQEGQRKAGAAVTTETEVIWARALPAGTSAQRAELIALTQALKMAEGKRLNVYTDSRYAFATAHIHGEIYKRRGWLTSEGREIKNKSEILALLKALFLPKRLSIIHCLGHQKGDSAEARGNRLADQAAREAAIKTPPDTSTLLAGKRTADGSEFEKRTADGSEFESPKKKAKVE

SEQ ID NO: 7050 - protein, 2090 aa, synthetic construct
MPAAKRVKLDGGDKKYSIGLDIGTNSVGWAVITDEYKVPSKKFKVLGNTDRHSIKKNLIGALLFDSGETAEATRLKRTARRRYTRRKNRICYLQEIFSNEMAKVDDSFFHRLEESFLVEEDKKHERHPIFGNIVDEVAYHEKYPTIYHLRKKLVDSTDKADLRLIYLALAHMIKFRGHFLIEGDLNPDNSDVDKLFIQLVQTYNQLFEENPINASGVDAKAILSARLSKSRRLENLIAQLPGEKKNGLFGNLIALSLGLTPNFKSNFDLAEDAKLQLSKDTYDDDLDNLLAQIGDQYADLFLAAKNLSDAILLSDILRVNTEITKAPLSASMIKRYDEHHQDLTLLKALVRQQLPEKYKEIFFDQSKNGYAGYIDGGASQEEFYKFIKPILEKMDGTEELLVKLNREDLLRKQRTFDNGSIPHQIHLGELHAILRRQEDFYPFLKDNREKIEKILTFRIPYYVGPLARGNSRFAWMTRKSEETITPWNFEEVVDKGASAQSFIERMTNFDKNLPNEKVLPKHSLLYEYFTVYNELTKVKYVTEGMRKPAFLSGEQKKAIVDLLFKTNRKVTVKQLKEDYFKKIECFDSVEISGVEDRFNASLGTYHDLLKIIKDKDFLDNEENEDILEDIVLTLTLFEDREMIEERLKTYAHLFDDKVMKQLKRRRYTGWGRLSRKLINGIRDKQSGKTILDFLKSDGFANRNFMQLIHDDSLTFKEDIQKAQVSGQGDSLHEHIANLAGSPAIKKGILQTVKVVDELVKVMGRHKPENIVIEMARENQTTQKGQKNSRERMKRIEEGIKELGSQILKEHPVENTQLQNEKLYLYYLQNGRDMYVDQELDINRLSDYDVDHIVPQSFLKDDSIDNKVLTRSDKARGKSDNVPSEEVVKKMKNYWRQLLNAKLITQRKFDNLTKAERGGLSELDKAGFIKRQLVETRQITKHVAQILDSRMNTKYDENDKLIREVKVITLKSKLVSDFRKDFQFYKVREINNYHHAHDAYLNAVVGTALIKKYPKLESEFVYGDYKVYDVRKMIAKSEQEIGKATAKYFFYSNIMNFFKTEITLANGEIRKRPLIETNGETGEIVWDKGRDFATVRKVLSMPQVNIVKKTEVQTGGFSKESILPKRNSDKLIARKKDWDPKKYGGFDSPTVAYSVLVVAKVEKGKSKKLKSVKELLGITIMERSSFEKNPIDFLEAKGYKEVKKDLIIKLPKYSLFELENGRKRMLASAGELQKGNELALPSKYVNFLYLASHYEKLKGSPEDNEQKQLFVEQHKHYLDEIIEQISEFSKRVILADANLDKVLSAYNKHRDKPIREQAENIIHLFTLTNLGAPAAFKYFDTTIDRKRYTSTKEVLDATLIHQSITGLYETRIDLSQLGGDGGGGSGSSEAAAKGGTLQLDDEYRLYSPLVKPDQNIQFWLEQFPQAWAETAGMGLAKQVPPQVIQLKASATPVSVRQYPLSKEAQEGIRPHVQRLIQQGILVPVQSPWNTPLLPVRKPGTNDYRPVQDLREVNKRVQDIHPTVPNPYNLLCALPPQRSWYTVLDLKDAFFCLRLHPTSQPLFAFEWRDPGTGRTGQLTWTRLPQGFKNSPTIFDEALHRDLANFRIQHPQVTLLQYVDDLLLAGATKQDCLEGTKALLLELSDLGYRASAKKAQICRREVTYLGYSLRDGQRWLTEARKKTVVQIPAPTTAKQVREFLGTAGFCRLWIPGFATLAAPLYPLTKEKGEFSWAPEHQKAFDAIKKALLSAPALALPDVTKPFTLYVDERKGVARGVLTQTLGPWRRPVAYLSKKLDPVASGWPVCLKAIAAVAILVKDADKLTLGQNITVIAPHALENIVRQPPDRWMTNARMTHYQSLLLTERVTFAPPAALNPATLLPEETDEPVTHDCHQLLIEETGVRKDLTDIPLTGEVLTWFTDGSSYVVEGKRMAGAAVVDGTRTIWASSLPEGTSAQKAELMALTQALRLAEGKSINIYTDSRYAFATAHVHGAIYKQRGLLTSAGREIKNKEEILSLLEALHLPKRLAIIHCPGHQKAKDPISRGNQMADRVAKQAAQGVNLLAGKRTADGSEFEKRTADGSEFESPKKKAKVE

SEQ ID NO: 7051 - protein, 2087 aa, synthetic construct
MPAAKRVKLDGGDKKYSIGLDIGTNSVGWAVITDEYKVPSKKFKVLGNTDRHSIKKNLIGALLFDSGETAEATRLKRTARRRYTRRKNRICYLQEIFSNEMAKVDDSFFHRLEESFLVEEDKKHERHPIFGNIVDEVAYHEKYPTIYHLRKKLVDSTDKADLRLIYLALAHMIKFRGHFLIEGDLNPDNSDVDKLFIQLVQTYNQLFEENPINASGVDAKAILSARLSKSRRLENLIAQLPGEKKNGLFGNLIALSLGLTPNFKSNFDLAEDAKLQLSKDTYDDDLDNLLAQIGDQYADLFLAAKNLSDAILLSDILRVNTEITKAPLSASMIKRYDEHHQDLTLLKALVRQQLPEKYKEIFFDQSKNGYAGYIDGGASQEEFYKFIKPILEKMDGTEELLVKLNREDLLRKQRTFDNGSIPHQIHLGELHAILRRQEDFYPFLKDNREKIEKILTFRIPYYVGPLARGNSRFAWMTRKSEETITPWNFEEVVDKGASAQSFIERMTNFDKNLPNEKVLPKHSLLYEYFTVYNELTKVKYVTEGMRKPAFLSGEQKKAIVDLLFKTNRKVTVKQLKEDYFKKIECFDSVEISGVEDRFNASLGTYHDLLKIIKDKDFLDNEENEDILEDIVLTLTLFEDREMIEERLKTYAHLFDDKVMKQLKRRRYTGWGRLSRKLINGIRDKQSGKTILDFLKSDGFANRNFMQLIHDDSLTFKEDIQKAQVSGQGDSLHEHIANLAGSPAIKKGILQTVKVVDELVKVMGRHKPENIVIEMARENQTTQKGQKNSRERMKRIEEGIKELGSQILKEHPVENTQLQNEKLYLYYLQNGRDMYVDQELDINRLSDYDVDHIVPQSFLKDDSIDNKVLTRSDKARGKSDNVPSEEVVKKMKNYWRQLLNAKLITQRKFDNLTKAERGGLSELDKAGFIKRQLVETRQITKHVAQILDSRMNTKYDENDKLIREVKVITLKSKLVSDFRKDFQFYKVREINNYHHAHDAYLNAVVGTALIKKYPKLESEFVYGDYKVYDVRKMIAKSEQEIGKATAKYFFYSNIMNFFKTEITLANGEIRKRPLIETNGETGEIVWDKGRDFATVRKVLSMPQVNIVKKTEVQTGGFSKESILPKRNSDKLIARKKDWDPKKYGGFDSPTVAYSVLVVAKVEKGKSKKLKSVKELLGITIMERSSFEKNPIDFLEAKGYKEVKKDLIIKLPKYSLFELENGRKRMLASAGELQKGNELALPSKYVNFLYLASHYEKLKGSPEDNEQKQLFVEQHKHYLDEIIEQISEFSKRVILADANLDKVLSAYNKHRDKPIREQAENIIHLFTLTNLGAPAAFKYFDTTIDRKRYTSTKEVLDATLIHQSITGLYETRIDLSQLGGDGGGGSGSSEAAAKGGIPWLMKKPLQLTTLVPLQEYEERLLKQTMLTGSYKEKLQSLFLKYDALWQHWENQVGHRRIKPHHIATGTVNPRPQKQYPINPKAKASIQTVINDLLKQGVLIQQNSIMNTPVYPVPKPDGKWRMVLDYREVNKTIPLIAAQNQHSAGILSSIFRGKYKTTLDLSNGFWAHSITPESYWLTAFTWLGQQYCWTRLPQGFLNSPALFNADVVDLLKEVPNVQVYVDDIYISHDDPREHLEQLEKVFSLLLNAGYVVSLKKSEIAQHEVEFLGFNITKEGRGLTETFKQKLLNITPPRDLKQLQSILGLLNFARNFIPNFSELVKPLYNIIATAPGKYITWTTDNSQQLQNIISMLNSAENLEERNPEVRLIMKVNTSPSAGYIRFYNEFAKRPIMYLNYVYTKAEVKFTNTEKLLTTIHKGLIKALDLGMGQEILVYSPIVSMTKIQKTPLPERKALPIRWITWMSYLEDPRIQFHYDKTLPELQQVPTVTDDIIAKIKHPSEFSMVFYTDGSAIKHPNVNKSHNAGMGIAQVQFKPEFTVINTWSIPLGDHTAQLAEVAAVEFACKKALKIDGPVLIVTDSFYVAESVNKELPYWQSNGFFNNKKKPLKHVSKWKSIADCIQLKPDIIIIHEKGHQPTASTFHTEGNNLADKLATQGSYVVNAGKRTADGSEFEKRTADGSEFESPKKKAKVE

SEQ ID NO: 7052 - protein, 2098 aa, synthetic construct
MPAAKRVKLDGGDKKYSIGLDIGTNSVGWAVITDEYKVPSKKFKVLGNTDRHSIKKNLIGALLFDSGETAEATRLKRTARRRYTRRKNRICYLQEIFSNEMAKVDDSFFHRLEESFLVEEDKKHERHPIFGNIVDEVAYHEKYPTIYHLRKKLVDSTDKADLRLIYLALAHMIKFRGHFLIEGDLNPDNSDVDKLFIQLVQTYNQLFEENPINASGVDAKAILSARLSKSRRLENLIAQLPGEKKNGLFGNLIALSLGLTPNFKSNFDLAEDAKLQLSKDTYDDDLDNLLAQIGDQYADLFLAAKNLSDAILLSDILRVNTEITKAPLSASMIKRYDEHHQDLTLLKALVRQQLPEKYKEIFFDQSKNGYAGYIDGGASQEEFYKFIKPILEKMDGTEELLVKLNREDLLRKQRTFDNGSIPHQIHLGELHAILRRQEDFYPFLKDNREKIEKILTFRIPYYVGPLARGNSRFAWMTRKSEETITPWNFEEVVDKGASAQSFIERMTNFDKNLPNEKVLPKHSLLYEYFTVYNELTKVKYVTEGMRKPAFLSGEQKKAIVDLLFKTNRKVTVKQLKEDYFKKIECFDSVEISGVEDRFNASLGTYHDLLKIIKDKDFLDNEENEDILEDIVLTLTLFEDREMIEERLKTYAHLFDDKVMKQLKRRRYTGWGRLSRKLINGIRDKQSGKTILDFLKSDGFANRNFMQLIHDDSLTFKEDIQKAQVSGQGDSLHEHIANLAGSPAIKKGILQTVKVVDELVKVMGRHKPENIVIEMARENQTTQKGQKNSRERMKRIEEGIKELGSQILKEHPVENTQLQNEKLYLYYLQNGRDMYVDQELDINRLSDYDVDHIVPQSFLKDDSIDNKVLTRSDKARGKSDNVPSEEVVKKMKNYWRQLLNAKLITQRKFDNLTKAERGGLSELDKAGFIKRQLVETRQITKHVAQILDSRMNTKYDENDKLIREVKVITLKSKLVSDFRKDFQFYKVREINNYHHAHDAYLNAVVGTALIKKYPKLESEFVYGDYKVYDVRKMIAKSEQEIGKATAKYFFYSNIMNFFKTEITLANGEIRKRPLIETNGETGEIVWDKGRDFATVRKVLSMPQVNIVKKTEVQTGGFSKESILPKRNSDKLIARKKDWDPKKYGGFDSPTVAYSVLVVAKVEKGKSKKLKSVKELLGITIMERSSFEKNPIDFLEAKGYKEVKKDLIIKLPKYSLFELENGRKRMLASAGELQKGNELALPSKYVNFLYLASHYEKLKGSPEDNEQKQLFVEQHKHYLDEIIEQISEFSKRVILADANLDKVLSAYNKHRDKPIREQAENIIHLFTLTNLGAPAAFKYFDTTIDRKRYTSTKEVLDATLIHQSITGLYETRIDLSQLGGDGGGGSEAAAKGSSGGTAPLEEEYRLFLEAPIQNVTLLEQWKREIPKVWAEINPPGLASTQAPIHVQLLSTALPVRVRQYPITLEAKRSLRETIRKFRAAGILRPVHSPWNTPLLPVRKSGTSEYRMVQDLREVNKRVETIHPTVPNPYTLLSLLPPDRIWYSVLDLKDAFFCIPLAPESQLIFAFEWADAEEGESGQLTWTRLPQGFKNSPTLFDEALNRDLQGFRLDHPSVSLLQYVDDLLIAADTQAACLSATRDLLMTLAELGYRVSGKKAQLCQEEVTYLGFKIHKGSRSLSNSRTQAILQIPVPKTKRQVREFLGTIGYCRLWIPGFAELAQPLYAATRGGNDPLVWGEKEEEAFQSLKLALTQPPALALPSLDKPFQLFVEETSGAAKGVLTQALGPWKRPVAYLSKRLDPVAAGWPRCLRAIAAAALLTREASKLTFGQDIEITSSHNLESLLRSPPDKWLTNARITQYQVLLLDPPRVRFKQTAALNPATLLPETDDTLPIHHCLDTLDSLTSTRPDLTDQPLAQAEATLFTDGSSYIRDGKRYAGAAVVTLDSVIWAEPLPIGTSAQKAELIALTKALEWSKDKSVNIYTDSRYAFATLHVHGMIYRERGLLTAGGKAIKNAPEILALLTAVWLPKRVAVMHCKGHQKDDAPTSTGNRRADEVAREVAIRPLSTQATISAGKRTADGSEFEKRTADGSEFESPKKKAKVE

SEQ ID NO: 7053 - protein, 2098 aa, synthetic construct
MPAAKRVKLDGGDKKYSIGLDIGTNSVGWAVITDEYKVPSKKFKVLGNTDRHSIKKNLIGALLFDSGETAEATRLKRTARRRYTRRKNRICYLQEIFSNEMAKVDDSFFHRLEESFLVEEDKKHERHPIFGNIVDEVAYHEKYPTIYHLRKKLVDSTDKADLRLIYLALAHMIKFRGHFLIEGDLNPDNSDVDKLFIQLVQTYNQLFEENPINASGVDAKAILSARLSKSRRLENLIAQLPGEKKNGLFGNLIALSLGLTPNFKSNFDLAEDAKLQLSKDTYDDDLDNLLAQIGDQYADLFLAAKNLSDAILLSDILRVNTEITKAPLSASMIKRYDEHHQDLTLLKALVRQQLPEKYKEIFFDQSKNGYAGYIDGGASQEEFYKFIKPILEKMDGTEELLVKLNREDLLRKQRTFDNGSIPHQIHLGELHAILRRQEDFYPFLKDNREKIEKILTFRIPYYVGPLARGNSRFAWMTRKSEETITPWNFEEVVDKGASAQSFIERMTNFDKNLPNEKVLPKHSLLYEYFTVYNELTKVKYVTEGMRKPAFLSGEQKKAIVDLLFKTNRKVTVKQLKEDYFKKIECFDSVEISGVEDRFNASLGTYHDLLKIIKDKDFLDNEENEDILEDIVLTLTLFEDREMIEERLKTYAHLFDDKVMKQLKRRRYTGWGRLSRKLINGIRDKQSGKTILDFLKSDGFANRNFMQLIHDDSLTFKEDIQKAQVSGQGDSLHEHIANLAGSPAIKKGILQTVKVVDELVKVMGRHKPENIVIEMARENQTTQKGQKNSRERMKRIEEGIKELGSQILKEHPVENTQLQNEKLYLYYLQNGRDMYVDQELDINRLSDYDVDHIVPQSFLKDDSIDNKVLTRSDKARGKSDNVPSEEVVKKMKNYWRQLLNAKLITQRKFDNLTKAERGGLSELDKAGFIKRQLVETRQITKHVAQILDSRMNTKYDENDKLIREVKVITLKSKLVSDFRKDFQFYKVREINNYHHAHDAYLNAVVGTALIKKYPKLESEFVYGDYKVYDVRKMIAKSEQEIGKATAKYFFYSNIMNFFKTEITLANGEIRKRPLIETNGETGEIVWDKGRDFATVRKVLSMPQVNIVKKTEVQTGGFSKESILPKRNSDKLIARKKDWDPKKYGGFDSPTVAYSVLVVAKVEKGKSKKLKSVKELLGITIMERSSFEKNPIDFLEAKGYKEVKKDLIIKLPKYSLFELENGRKRMLASAGELQKGNELALPSKYVNFLYLASHYEKLKGSPEDNEQKQLFVEQHKHYLDEIIEQISEFSKRVILADANLDKVLSAYNKHRDKPIREQAENIIHLFTLTNLGAPAAFKYFDTTIDRKRYTSTKEVLDATLIHQSITGLYETRIDLSQLGGDGGGGSEAAAKGSSGGTAPLEEEYRLFLEAPIQNVTLLEQWKREIPKVWAEINPPGLASTQAPIHVQLLSTALPVRVRQYPITLEAKRSLRETIRKFRAAGILRPVHSPWNTPLLPVRKSGTSEYRMVQDLREVNKRVETIHPTVPNPYTLLSLLPPDRIWYSVLDLKDAFFCIPLAPESQLIFAFEWADAEEGESGQLTWTRLPQGFKNSPTLFNEALNRDLQGFRLDHPSVSLLQYVDDLLIAADTQAACLSATRDLLMTLAELGYRVSGKKAQLCQEEVTYLGFKIHKGSRSLSNSRTQAILQIPVPKTKRQVREFLGTIGYCRLWIPGFAELAQPLYAATRPGNDPLVWGEKEEEAFQSLKLALTQPPALALPSLDKPFQLFVEETSGAAKGVLTQALGPWKRPVAYLSKRLDPVAAGWPRCLRAIAAAALLTREASKLTFGQDIEITSSHNLESLLRSPPDKWLTNARITQYQVLLLDPPRVRFKQTAALNPATLLPETDDTLPIHHCLDTLDSLTSTRPDLTDQPLAQAEATLFTDGSSYIRDGKRYAGAAVVTLDSVIWAEPLPIGTSAQKAELIALTKALEWSKDKSVNIYTDSRYAFATLHVHGMIYRERGWLTAGGKAIKNAPEILALLTAVWLPKRVAVMHCKGHQKDDAPTSTGNRRADEVAREVAIRPLSTQATISAGKRTADGSEFEKRTADGSEFESPKKKAKVE

SEQ ID NO: 7054 - protein, 2098 aa, synthetic construct
MPAAKRVKLDGGDKKYSIGLDIGTNSVGWAVITDEYKVPSKKFKVLGNTDRHSIKKNLIGALLFDSGETAEATRLKRTARRRYTRRKNRICYLQEIFSNEMAKVDDSFFHRLEESFLVEEDKKHERHPIFGNIVDEVAYHEKYPTIYHLRKKLVDSTDKADLRLIYLALAHMIKFRGHFLIEGDLNPDNSDVDKLFIQLVQTYNQLFEENPINASGVDAKAILSARLSKSRRLENLIAQLPGEKKNGLFGNLIALSLGLTPNFKSNFDLAEDAKLQLSKDTYDDDLDNLLAQIGDQYADLFLAAKNLSDAILLSDILRVNTEITKAPLSASMIKRYDEHHQDLTLLKALVRQQLPEKYKEIFFDQSKNGYAGYIDGGASQEEFYKFIKPILEKMDGTEELLVKLNREDLLRKQRTFDNGSIPHQIHLGELHAILRRQEDFYPFLKDNREKIEKILTFRIPYYVGPLARGNSRFAWMTRKSEETITPWNFEEVVDKGASAQSFIERMTNFDKNLPNEKVLPKHSLLYEYFTVYNELTKVKYVTEGMRKPAFLSGEQKKAIVDLLFKTNRKVTVKQLKEDYFKKIECFDSVEISGVEDRFNASLGTYHDLLKIIKDKDFLDNEENEDILEDIVLTLTLFEDREMIEERLKTYAHLFDDKVMKQLKRRRYTGWGRLSRKLINGIRDKQSGKTILDFLKSDGFANRNFMQLIHDDSLTFKEDIQKAQVSGQGDSLHEHIANLAGSPAIKKGILQTVKVVDELVKVMGRHKPENIVIEMARENQTTQKGQKNSRERMKRIEEGIKELGSQILKEHPVENTQLQNEKLYLYYLQNGRDMYVDQELDINRLSDYDVDHIVPQSFLKDDSIDNKVLTRSDKARGKSDNVPSEEVVKKMKNYWRQLLNAKLITQRKFDNLTKAERGGLSELDKAGFIKRQLVETRQITKHVAQILDSRMNTKYDENDKLIREVKVITLKSKLVSDFRKDFQFYKVREINNYHHAHDAYLNAVVGTALIKKYPKLESEFVYGDYKVYDVRKMIAKSEQEIGKATAKYFFYSNIMNFFKTEITLANGEIRKRPLIETNGETGEIVWDKGRDFATVRKVLSMPQVNIVKKTEVQTGGFSKESILPKRNSDKLIARKKDWDPKKYGGFDSPTVAYSVLVVAKVEKGKSKKLKSVKELLGITIMERSSFEKNPIDFLEAKGYKEVKKDLIIKLPKYSLFELENGRKRMLASAGELQKGNELALPSKYVNFLYLASHYEKLKGSPEDNEQKQLFVEQHKHYLDEIIEQISEFSKRVILADANLDKVLSAYNKHRDKPIREQAENIIHLFTLTNLGAPAAFKYFDTTIDRKRYTSTKEVLDATLIHQSITGLYETRIDLSQLGGDGGGGSEAAAKGSSGGTAPLEEEYRLFLEAPIQNVTLLEQWKREIPKVWAEINPPGLASTQAPIHVQLLSTALPVRVRQYPITLEAKRSLRETIRKFRAAGILRPVHSPWNTPLLPVRKSGTSEYRMVQDLREVNKRVETIHPTVPNPYTLLSLLPPDRIWYSVLDLKDAFFCIPLAPESQLIFAFEWADAEEGESGQLTWTRLPQGFKNSPTLFNEALNRDLQGFRLDHPSVSLLQYVDDLLIAADTQAACLSATRDLLMTLAELGYRVSGKKAQLCQEEVTYLGFKIHKGSRSLSNSRTQAILQIPVPKTKRQVREFLGKIGYCRLFIPGFAELAQPLYAATRPGNDPLVWGEKEEEAFQSLKLALTQPPALALPSLDKPFQLFVEETSGAAKGVLTQALGPWKRPVAYLSKRLDPVAAGWPRCLRAIAAAALLTREASKLTFGQDIEITSSHNLESLLRSPPDKWLTNARITQYQVLLLDPPRVRFKQTAALNPATLLPETDDTLPIHHCLDTLDSLTSTRPDLTDQPLAQAEATLFTDGSSYIRDGKRYAGAAVVTLDSVIWAEPLPIGTSAQKAELIALTKALEWSKDKSVNIYTDSRYAFATLHVHGMIYRERGWLTAGGKAIKNAPEILALLTAVWLPKRVAVMHCKGHQKDDAPTSTGNRRADEVAREVAIRPLSTQATISAGKRTADGSEFEKRTADGSEFESPKKKAKVE

SEQ ID NO: 7055 - protein, 2087 aa, synthetic construct
MPAAKRVKLDGGDKKYSIGLDIGTNSVGWAVITDEYKVPSKKFKVLGNTDRHSIKKNLIGALLFDSGETAEATRLKRTARRRYTRRKNRICYLQEIFSNEMAKVDDSFFHRLEESFLVEEDKKHERHPIFGNIVDEVAYHEKYPTIYHLRKKLVDSTDKADLRLIYLALAHMIKFRGHFLIEGDLNPDNSDVDKLFIQLVQTYNQLFEENPINASGVDAKAILSARLSKSRRLENLIAQLPGEKKNGLFGNLIALSLGLTPNFKSNFDLAEDAKLQLSKDTYDDDLDNLLAQIGDQYADLFLAAKNLSDAILLSDILRVNTEITKAPLSASMIKRYDEHHQDLTLLKALVRQQLPEKYKEIFFDQSKNGYAGYIDGGASQEEFYKFIKPILEKMDGTEELLVKLNREDLLRKQRTFDNGSIPHQIHLGELHAILRRQEDFYPFLKDNREKIEKILTFRIPYYVGPLARGNSRFAWMTRKSEETITPWNFEEVVDKGASAQSFIERMTNFDKNLPNEKVLPKHSLLYEYFTVYNELTKVKYVTEGMRKPAFLSGEQKKAIVDLLFKTNRKVTVKQLKEDYFKKIECFDSVEISGVEDRFNASLGTYHDLLKIIKDKDFLDNEENEDILEDIVLTLTLFEDREMIEERLKTYAHLFDDKVMKQLKRRRYTGWGRLSRKLINGIRDKQSGKTILDFLKSDGFANRNFMQLIHDDSLTFKEDIQKAQVSGQGDSLHEHIANLAGSPAIKKGILQTVKVVDELVKVMGRHKPENIVIEMARENQTTQKGQKNSRERMKRIEEGIKELGSQILKEHPVENTQLQNEKLYLYYLQNGRDMYVDQELDINRLSDYDVDHIVPQSFLKDDSIDNKVLTRSDKARGKSDNVPSEEVVKKMKNYWRQLLNAKLITQRKFDNLTKAERGGLSELDKAGFIKRQLVETRQITKHVAQILDSRMNTKYDENDKLIREVKVITLKSKLVSDFRKDFQFYKVREINNYHHAHDAYLNAVVGTALIKKYPKLESEFVYGDYKVYDVRKMIAKSEQEIGKATAKYFFYSNIMNFFKTEITLANGEIRKRPLIETNGETGEIVWDKGRDFATVRKVLSMPQVNIVKKTEVQTGGFSKESILPKRNSDKLIARKKDWDPKKYGGFDSPTVAYSVLVVAKVEKGKSKKLKSVKELLGITIMERSSFEKNPIDFLEAKGYKEVKKDLIIKLPKYSLFELENGRKRMLASAGELQKGNELALPSKYVNFLYLASHYEKLKGSPEDNEQKQLFVEQHKHYLDEIIEQISEFSKRVILADANLDKVLSAYNKHRDKPIREQAENIIHLFTLTNLGAPAAFKYFDTTIDRKRYTSTKEVLDATLIHQSITGLYETRIDLSQLGGDGGGGSEAAAKGSSGGVPWILKKPLELTIKLDLEEQQGTLLNNSILSKKGKEELKQLFEKYSALWQSWENQVGHRRIRPHKIATGTVKPTPQKQYHINPKAKPDIQIVINDLLKQGVLIQKESTMNTPVYPVPKPNGRWRMVLDYRAVNKVTPLIAVQNQHSYGILGSLFKGRYKTTIDLSNGFWAHPIVPEDYWITAFTWQGKQYCWTVLPQGFLNSPGLFTGDVVDLLQGIPNVEVYVDDVYISHDSEKEHLEYLDILFNRLKEAGYIISLKKSNIANSIVDFLGFQITNEGRGLTDTFKEKLENITAPTTLKQLQSILGLLNFARNFIPDFTELIAPLYALIPKSTKNYVPWQIEHSTTLETLITKLNGAEYLQGRKGDKTLIMKVNASYTTGYIRYYNEGEKKPISYVSIVFSKTELKFTELEKLLTTVHKGLLKALDLSMGQNIHVYSPIVSMQNIQKTPQTAKKALASRWLSWLSYLEDPRIRFFYDPQMPALKDLPAVDTGKDNKKHPSNFQHIFYTDGSAITSPTKEGHLNAGMGIVYFINKDGNLQKQQEWSISLGNHTAQFAEIAAFEFALKKCLPLGGNILVVTDSNYVAKAYNEELDVWASNGFVNNRKKPLKHISKWKSVADLKRLRPDVVVTHEPGHQKLDSSPHAYGNNLADQLATQASFKVHAGKRTADGSEFEKRTADGSEFESPKKKAKVE

SEQ ID NO: 7056 - protein, 2176 aa, synthetic construct
MPAAKRVKLDGGDKKYSIGLDIGTNSVGWAVITDEYKVPSKKFKVLGNTDRHSIKKNLIGALLFDSGETAEATRLKRTARRRYTRRKNRICYLQEIFSNEMAKVDDSFFHRLEESFLVEEDKKHERHPIFGNIVDEVAYHEKYPTIYHLRKKLVDSTDKADLRLIYLALAHMIKFRGHFLIEGDLNPDNSDVDKLFIQLVQTYNQLFEENPINASGVDAKAILSARLSKSRRLENLIAQLPGEKKNGLFGNLIALSLGLTPNFKSNFDLAEDAKLQLSKDTYDDDLDNLLAQIGDQYADLFLAAKNLSDAILLSDILRVNTEITKAPLSASMIKRYDEHHQDLTLLKALVRQQLPEKYKEIFFDQSKNGYAGYIDGGASQEEFYKFIKPILEKMDGTEELLVKLNREDLLRKQRTFDNGSIPHQIHLGELHAILRRQEDFYPFLKDNREKIEKILTFRIPYYVGPLARGNSRFAWMTRKSEETITPWNFEEVVDKGASAQSFIERMTNFDKNLPNEKVLPKHSLLYEYFTVYNELTKVKYVTEGMRKPAFLSGEQKKAIVDLLFKTNRKVTVKQLKEDYFKKIECFDSVEISGVEDRFNASLGTYHDLLKIIKDKDFLDNEENEDILEDIVLTLTLFEDREMIEERLKTYAHLFDDKVMKQLKRRRYTGWGRLSRKLINGIRDKQSGKTILDFLKSDGFANRNFMQLIHDDSLTFKEDIQKAQVSGQGDSLHEHIANLAGSPAIKKGILQTVKVVDELVKVMGRHKPENIVIEMARENQTTQKGQKNSRERMKRIEEGIKELGSQILKEHPVENTQLQNEKLYLYYLQNGRDMYVDQELDINRLSDYDVDHIVPQSFLKDDSIDNKVLTRSDKARGKSDNVPSEEVVKKMKNYWRQLLNAKLITQRKFDNLTKAERGGLSELDKAGFIKRQLVETRQITKHVAQILDSRMNTKYDENDKLIREVKVITLKSKLVSDFRKDFQFYKVREINNYHHAHDAYLNAVVGTALIKKYPKLESEFVYGDYKVYDVRKMIAKSEQEIGKATAKYFFYSNIMNFFKTEITLANGEIRKRPLIETNGETGEIVWDKGRDFATVRKVLSMPQVNIVKKTEVQTGGFSKESILPKRNSDKLIARKKDWDPKKYGGFDSPTVAYSVLVVAKVEKGKSKKLKSVKELLGITIMERSSFEKNPIDFLEAKGYKEVKKDLIIKLPKYSLFELENGRKRMLASAGELQKGNELALPSKYVNFLYLASHYEKLKGSPEDNEQKQLFVEQHKHYLDEIIEQISEFSKRVILADANLDKVLSAYNKHRDKPIREQAENIIHLFTLTNLGAPAAFKYFDTTIDRKRYTSTKEVLDATLIHQSITGLYETRIDLSQLGGDGGGGSEAAAKGSSGGMNPLQLLQPLPAEIKGTKLLAHWNSGATITCIPESFLEDEQPIKKTLIKTIHGEKQQNVYYVTFKVKGRKVEAEVIASPYEYILLSPTDVPWLTQQPLQLTILVPLQEYQEKILSKTALPEDQKQQLKTLFVKYDNLWQHWENQVGHRKIRPHNIATGDYPPRPQKQYPINPKAKPSIQIVIDDLLKQGVLTPQNSTMNTPVYPVPKPDGRWRMVLDYREVNKTIPLTAAQNQHSAGILATIVRQKYKTTLDLANGFWAHPITPESYWLTAFTWQGKQYCWTRLPQGFLNSPALFNADVVDLLKEIPNVQVYVDDIYLSHDDPKEHVQQLEKVFQILLQAGYVVSLKKSEIGQKTVEFLGFNITKEGRGLTDTFKTKLLNITPPKDLKQLQSILGKLNFARNFIPNFAELVQPLYNLIAPAKGKYIEWSEENTKQLNMVIEALNTASNLEERLPEQRLVIKVNTSPSAGYVRYYNETGKKPIMYLNYVFSKAELKFSMLEKLLTTMHKALIKAMDLAMGQEILVYSPIVSMTKIQKTPLPERKALPIRWITWMTYLEDPRIQFHYDKTLPELKHIPDVYTSSQSPVKHPSQYEGVFYTDGSAIKSPDPTKSNNAGMGIVHATYKPEYQVLNQWSIPLGNHTAQMAEIAAVEFACKKALKIPGPVLVITDSFYVAESANKELPYWKSNGFVNNKKKPLKHISKWKSIAECLSMKPDITIQHEKGISLQIPVFILKGNALADKLATQGSYVVNAGKRTADGSEFEKRTADGSEFESPKKKAKVE

SEQ ID NO: 7057 - protein, 2218 aa, synthetic construct
MPAAKRVKLDGGDKKYSIGLDIGTNSVGWAVITDEYKVPSKKFKVLGNTDRHSIKKNLIGALLFDSGETAEATRLKRTARRRYTRRKNRICYLQEIFSNEMAKVDDSFFHRLEESFLVEEDKKHERHPIFGNIVDEVAYHEKYPTIYHLRKKLVDSTDKADLRLIYLALAHMIKFRGHFLIEGDLNPDNSDVDKLFIQLVQTYNQLFEENPINASGVDAKAILSARLSKSRRLENLIAQLPGEKKNGLFGNLIALSLGLTPNFKSNFDLAEDAKLQLSKDTYDDDLDNLLAQIGDQYADLFLAAKNLSDAILLSDILRVNTEITKAPLSASMIKRYDEHHQDLTLLKALVRQQLPEKYKEIFFDQSKNGYAGYIDGGASQEEFYKFIKPILEKMDGTEELLVKLNREDLLRKQRTFDNGSIPHQIHLGELHAILRRQEDFYPFLKDNREKIEKILTFRIPYYVGPLARGNSRFAWMTRKSEETITPWNFEEVVDKGASAQSFIERMTNFDKNLPNEKVLPKHSLLYEYFTVYNELTKVKYVTEGMRKPAFLSGEQKKAIVDLLFKTNRKVTVKQLKEDYFKKIECFDSVEISGVEDRFNASLGTYHDLLKIIKDKDFLDNEENEDILEDIVLTLTLFEDREMIEERLKTYAHLFDDKVMKQLKRRRYTGWGRLSRKLINGIRDKQSGKTILDFLKSDGFANRNFMQLIHDDSLTFKEDIQKAQVSGQGDSLHEHIANLAGSPAIKKGILQTVKVVDELVKVMGRHKPENIVIEMARENQTTQKGQKNSRERMKRIEEGIKELGSQILKEHPVENTQLQNEKLYLYYLQNGRDMYVDQELDINRLSDYDVDHIVPQSFLKDDSIDNKVLTRSDKARGKSDNVPSEEVVKKMKNYWRQLLNAKLITQRKFDNLTKAERGGLSELDKAGFIKRQLVETRQITKHVAQILDSRMNTKYDENDKLIREVKVITLKSKLVSDFRKDFQFYKVREINNYHHAHDAYLNAVVGTALIKKYPKLESEFVYGDYKVYDVRKMIAKSEQEIGKATAKYFFYSNIMNFFKTEITLANGEIRKRPLIETNGETGEIVWDKGRDFATVRKVLSMPQVNIVKKTEVQTGGFSKESILPKRNSDKLIARKKDWDPKKYGGFDSPTVAYSVLVVAKVEKGKSKKLKSVKELLGITIMERSSFEKNPIDFLEAKGYKEVKKDLIIKLPKYSLFELENGRKRMLASAGELQKGNELALPSKYVNFLYLASHYEKLKGSPEDNEQKQLFVEQHKHYLDEIIEQISEFSKRVILADANLDKVLSAYNKHRDKPIREQAENIIHLFTLTNLGAPAAFKYFDTTIDRKRYTSTKEVLDATLIHQSITGLYETRIDLSQLGGDGGGGSEAAAKGSSGGTLGDQGSRGSDPLPEPRVTLTVEGIPTEFLVNTGAEHSVLTKPMGKMGSKRTVVAGATGSKVYPWTTKRLLKIGQKQVTHSFLVIPECPAPLLGRDLLTKLKAQIQFSTEGPQVTWEDRPAMCLVLNLEEEYRLHEKPVPPSIDPSWLQLFPMVWAEKAGMGLANQVPPVVVELKSDASPVAVRQYPMSKEAREGIRPHIQRFLDLGILVPCQSPWNTPLLPVKKPGTNDYRPVQDLREVNKRVQDIHPTVPNPYNLLSSLPPSHTWYSVLDLKDAFFCLKLHPNSQPLFAFEWRDPEKGNTGQLTWTRLPQGFKNSPTLFDEALHRDLASFRALNPQVVMLQYVDDLLVAAPTYRDCKEGTRRLLQELSKLGYRVSAKKAQLCREEVTYLGYLLKGGKRWLTPARKATVMKIPTPTTPRQVREFLGTAGFCRLWIPGFASLAAPLYPLTREKVPFTWTEAHQEAFGRIKEALLSAPALALPDLTKPFALYVDEKEGVARGVLTQTLGPWRRPVAYLSKKLDPVASGWPTCLKAIAAVALLLKDADKLTLGQNVLVIAPHNLESIVRQPPDRWMTNARMTHYQSLLLNERVSFAPPAILNPATLLPVESDDTPIHICSEILAEETGTRPDLRDQPLPGVPAWYTDGSSFIMDGRRQAGAAIVDNKRTVWASNLPEGTSAQKAELIALTQALRLAEGKSINIYTDSRYAFATAHVHGAIYKQRGLLTSAGKDIKNKEEILALLEAIHLPKRVAIIHCPGHQRGTDPVATGNRKADEAAKQAAQSTRILTETTKNAGKRTADGSEFEKRTADGSEFESPKKKAKVE

SEQ ID NO: 7058 - protein, 2127 aa, synthetic construct
MPAAKRVKLDGGDKKYSIGLDIGTNSVGWAVITDEYKVPSKKFKVLGNTDRHSIKKNLIGALLFDSGETAEATRLKRTARRRYTRRKNRICYLQEIFSNEMAKVDDSFFHRLEESFLVEEDKKHERHPIFGNIVDEVAYHEKYPTIYHLRKKLVDSTDKADLRLIYLALAHMIKFRGHFLIEGDLNPDNSDVDKLFIQLVQTYNQLFEENPINASGVDAKAILSARLSKSRRLENLIAQLPGEKKNGLFGNLIALSLGLTPNFKSNFDLAEDAKLQLSKDTYDDDLDNLLAQIGDQYADLFLAAKNLSDAILLSDILRVNTEITKAPLSASMIKRYDEHHQDLTLLKALVRQQLPEKYKEIFFDQSKNGYAGYIDGGASQEEFYKFIKPILEKMDGTEELLVKLNREDLLRKQRTFDNGSIPHQIHLGELHAILRRQEDFYPFLKDNREKIEKILTFRIPYYVGPLARGNSRFAWMTRKSEETITPWNFEEVVDKGASAQSFIERMTNFDKNLPNEKVLPKHSLLYEYFTVYNELTKVKYVTEGMRKPAFLSGEQKKAIVDLLFKTNRKVTVKQLKEDYFKKIECFDSVEISGVEDRFNASLGTYHDLLKIIKDKDFLDNEENEDILEDIVLTLTLFEDREMIEERLKTYAHLFDDKVMKQLKRRRYTGWGRLSRKLINGIRDKQSGKTILDFLKSDGFANRNFMQLIHDDSLTFKEDIQKAQVSGQGDSLHEHIANLAGSPAIKKGILQTVKVVDELVKVMGRHKPENIVIEMARENQTTQKGQKNSRERMKRIEEGIKELGSQILKEHPVENTQLQNEKLYLYYLQNGRDMYVDQELDINRLSDYDVDHIVPQSFLKDDSIDNKVLTRSDKARGKSDNVPSEEVVKKMKNYWRQLLNAKLITQRKFDNLTKAERGGLSELDKAGFIKRQLVETRQITKHVAQILDSRMNTKYDENDKLIREVKVITLKSKLVSDFRKDFQFYKVREINNYHHAHDAYLNAVVGTALIKKYPKLESEFVYGDYKVYDVRKMIAKSEQEIGKATAKYFFYSNIMNFFKTEITLANGEIRKRPLIETNGETGEIVWDKGRDFATVRKVLSMPQVNIVKKTEVQTGGFSKESILPKRNSDKLIARKKDWDPKKYGGFDSPTVAYSVLVVAKVEKGKSKKLKSVKELLGITIMERSSFEKNPIDFLEAKGYKEVKKDLIIKLPKYSLFELENGRKRMLASAGELQKGNELALPSKYVNFLYLASHYEKLKGSPEDNEQKQLFVEQHKHYLDEIIEQISEFSKRVILADANLDKVLSAYNKHRDKPIREQAENIIHLFTLTNLGAPAAFKYFDTTIDRKRYTSTKEVLDATLIHQSITGLYETRIDLSQLGGDGGGGSEAAAKGSSGGLLGRDLLTKLKAQIQFSTEGPQVTWEDRPAMCLVLNLEEEYRLHEKPVPPSIDPSWLQLFPMVWAEKAGMGLANQVPPVVVELKSDASPVAVRQYPMSKEAREGIRPHIQRFLDLGILVPCQSPWNTPLLPVKKPGTNDYRPVQDLREVNKRVQDIHPTVPNPYNLLSSLPPSHTWYSVLDLKDAFFCLKLHPNSQPLFAFEWRDPEKGNTGQLTWTRLPQGFKNSPTLFNEALHRDLASFRALNPQVVMLQYVDDLLVAAPTYRDCKEGTRRLLQELSKLGYRVSAKKAQLCREEVTYLGYLLKGGKRWLTPARKATVMKIPTPTTPRQVREFLGTAGFCRLWIPGFASLAAPLYPLTRPKVPFTWTEAHQEAFGRIKEALLSAPALALPDLTKPFALYVDEKEGVARGVLTQTLGPWRRPVAYLSKKLDPVASGWPTCLKAIAAVALLLKDADKLTLGQNVLVIAPHNLESIVRQPPDRWMTNARMTHYQSLLLNERVSFAPPAILNPATLLPVESDDTPIHICSEILAEETGTRPDLRDQPLPGVPAWYTDGSSFIMDGRRQAGAAIVDNKRTVWASNLPEGTSAQKAELIALTQALRLAEGKSINIYTDSRYAFATAHVHGAIYKQRGWLTSAGKDIKNKEEILALLEAIHLPKRVAIIHCPGHQRGTDPVATGNRKADEAAKQAAQSTRILTETTKNAGKRTADGSEFEKRTADGSEFESPKKKAKVE

SEQ ID NO: 7059 - protein, 2096 aa, synthetic construct
MPAAKRVKLDGGDKKYSIGLDIGTNSVGWAVITDEYKVPSKKFKVLGNTDRHSIKKNLIGALLFDSGETAEATRLKRTARRRYTRRKNRICYLQEIFSNEMAKVDDSFFHRLEESFLVEEDKKHERHPIFGNIVDEVAYHEKYPTIYHLRKKLVDSTDKADLRLIYLALAHMIKFRGHFLIEGDLNPDNSDVDKLFIQLVQTYNQLFEENPINASGVDAKAILSARLSKSRRLENLIAQLPGEKKNGLFGNLIALSLGLTPNFKSNFDLAEDAKLQLSKDTYDDDLDNLLAQIGDQYADLFLAAKNLSDAILLSDILRVNTEITKAPLSASMIKRYDEHHQDLTLLKALVRQQLPEKYKEIFFDQSKNGYAGYIDGGASQEEFYKFIKPILEKMDGTEELLVKLNREDLLRKQRTFDNGSIPHQIHLGELHAILRRQEDFYPFLKDNREKIEKILTFRIPYYVGPLARGNSRFAWMTRKSEETITPWNFEEVVDKGASAQSFIERMTNFDKNLPNEKVLPKHSLLYEYFTVYNELTKVKYVTEGMRKPAFLSGEQKKAIVDLLFKTNRKVTVKQLKEDYFKKIECFDSVEISGVEDRFNASLGTYHDLLKIIKDKDFLDNEENEDILEDIVLTLTLFEDREMIEERLKTYAHLFDDKVMKQLKRRRYTGWGRLSRKLINGIRDKQSGKTILDFLKSDGFANRNFMQLIHDDSLTFKEDIQKAQVSGQGDSLHEHIANLAGSPAIKKGILQTVKVVDELVKVMGRHKPENIVIEMARENQTTQKGQKNSRERMKRIEEGIKELGSQILKEHPVENTQLQNEKLYLYYLQNGRDMYVDQELDINRLSDYDVDHIVPQSFLKDDSIDNKVLTRSDKARGKSDNVPSEEVVKKMKNYWRQLLNAKLITQRKFDNLTKAERGGLSELDKAGFIKRQLVETRQITKHVAQILDSRMNTKYDENDKLIREVKVITLKSKLVSDFRKDFQFYKVREINNYHHAHDAYLNAVVGTALIKKYPKLESEFVYGDYKVYDVRKMIAKSEQEIGKATAKYFFYSNIMNFFKTEITLANGEIRKRPLIETNGETGEIVWDKGRDFATVRKVLSMPQVNIVKKTEVQTGGFSKESILPKRNSDKLIARKKDWDPKKYGGFDSPTVAYSVLVVAKVEKGKSKKLKSVKELLGITIMERSSFEKNPIDFLEAKGYKEVKKDLIIKLPKYSLFELENGRKRMLASAGELQKGNELALPSKYVNFLYLASHYEKLKGSPEDNEQKQLFVEQHKHYLDEIIEQISEFSKRVILADANLDKVLSAYNKHRDKPIREQAENIIHLFTLTNLGAPAAFKYFDTTIDRKRYTSTKEVLDATLIHQSITGLYETRIDLSQLGGDGGGGSEAAAKGSSGGTLGIEDEYRLHETSTEPDVSLGSTWLSDFPQAWAETGGMGLAVRQAPLIIPLKATSTPVSIQQYPMSHEARLGIKPHIQRLLDQGILVPCQSPWNTPLLPVKKPGTNDYRPVQDLREVNKRVEDIHPTVPNPYNLLSGLPPSHQWYTVLDLKDAFFCLRLHPTSQPLFAFEWRDPGMGISGQLTWTRLPQGFKNSPTLFDEALHRDLADFRIQHPDLILLQYVDDILLAATSELDCQQGTRALLQTLGDLGYRASAKKAQICQKQVKYLGYLLREGQRWLTEARKETVMGQPVPKTPRQLREFLGTAGFCRLWIPGFAEMAAPLYPLTKTGTLFSWGPDQQKAYQEIKQALLTAPALGLPDLTKPFELFVDEKQGYAKGVLTQKLGPWRRPVAYLSKKLDPVAAGWPPCLRMVAAIAVLTKDAGKLTMGQPLVILAPHAVEALVKQPPDRWLSNARMTHYQAMLLDTDRVQFGPVVALNPATLLPLPEEGAPHDCLEILAETHGTRPDLTDQPIPDADHTWYTDGSSFLQEGQRKAGAAVTTETEVIWAGALPAGTSAQRAELIALTQALKMAEGKRLNVYTDSRYAFATAHIHGEIYRRRGLLTSEGREIKNKSEILALLKALFLPKRLSIIHCLGHQKGDSAEARGNRLADQAAREAAIKTPPDTSTLLAGKRTADGSEFEKRTADGSEFESPKKKAKVE

SEQ ID NO: 7060 - protein, 2096 aa, synthetic construct
MPAAKRVKLDGGDKKYSIGLDIGTNSVGWAVITDEYKVPSKKFKVLGNTDRHSIKKNLIGALLFDSGETAEATRLKRTARRRYTRRKNRICYLQEIFSNEMAKVDDSFFHRLEESFLVEEDKKHERHPIFGNIVDEVAYHEKYPTIYHLRKKLVDSTDKADLRLIYLALAHMIKFRGHFLIEGDLNPDNSDVDKLFIQLVQTYNQLFEENPINASGVDAKAILSARLSKSRRLENLIAQLPGEKKNGLFGNLIALSLGLTPNFKSNFDLAEDAKLQLSKDTYDDDLDNLLAQIGDQYADLFLAAKNLSDAILLSDILRVNTEITKAPLSASMIKRYDEHHQDLTLLKALVRQQLPEKYKEIFFDQSKNGYAGYIDGGASQEEFYKFIKPILEKMDGTEELLVKLNREDLLRKQRTFDNGSIPHQIHLGELHAILRRQEDFYPFLKDNREKIEKILTFRIPYYVGPLARGNSRFAWMTRKSEETITPWNFEEVVDKGASAQSFIERMTNFDKNLPNEKVLPKHSLLYEYFTVYNELTKVKYVTEGMRKPAFLSGEQKKAIVDLLFKTNRKVTVKQLKEDYFKKIECFDSVEISGVEDRFNASLGTYHDLLKIIKDKDFLDNEENEDILEDIVLTLTLFEDREMIEERLKTYAHLFDDKVMKQLKRRRYTGWGRLSRKLINGIRDKQSGKTILDFLKSDGFANRNFMQLIHDDSLTFKEDIQKAQVSGQGDSLHEHIANLAGSPAIKKGILQTVKVVDELVKVMGRHKPENIVIEMARENQTTQKGQKNSRERMKRIEEGIKELGSQILKEHPVENTQLQNEKLYLYYLQNGRDMYVDQELDINRLSDYDVDHIVPQSFLKDDSIDNKVLTRSDKARGKSDNVPSEEVVKKMKNYWRQLLNAKLITQRKFDNLTKAERGGLSELDKAGFIKRQLVETRQITKHVAQILDSRMNTKYDENDKLIREVKVITLKSKLVSDFRKDFQFYKVREINNYHHAHDAYLNAVVGTALIKKYPKLESEFVYGDYKVYDVRKMIAKSEQEIGKATAKYFFYSNIMNFFKTEITLANGEIRKRPLIETNGETGEIVWDKGRDFATVRKVLSMPQVNIVKKTEVQTGGFSKESILPKRNSDKLIARKKDWDPKKYGGFDSPTVAYSVLVVAKVEKGKSKKLKSVKELLGITIMERSSFEKNPIDFLEAKGYKEVKKDLIIKLPKYSLFELENGRKRMLASAGELQKGNELALPSKYVNFLYLASHYEKLKGSPEDNEQKQLFVEQHKHYLDEIIEQISEFSKRVILADANLDKVLSAYNKHRDKPIREQAENIIHLFTLTNLGAPAAFKYFDTTIDRKRYTSTKEVLDATLIHQSITGLYETRIDLSQLGGDGGGGSEAAAKGSSGGTLNIEDEYRLHETSKGPDVPLGSTWLSDFPQAWAETGGMGLAVRQAPLIIPLKATSTPVSIKQYPMSQEARLGIKPHIQRLLDQGILVPCQSPWNTPLLPVKKPGTNDYRPVQDLREVNKRVEDIHPTVPNPYNLLSGLPPSHQWYTVLDLKDAFFCLRLHPTSQSLFAFEWRDPEMGISGQLTWTRLPQGFKNSPTLFNEALHRDLADFRIQHPDLILLQYVDDLLLAATSELDCQQGTRALLQTLGDLGYRASAKKAQICQKQVKYLGYLLKEGQRWLTEARKETVMGQPTPKTPRQLREFLGTAGFCRLWIPGFAEMAAPLYPLTKPGTLFEWGPDQQKAYQEIKQALLTAPALGLPDLTKPFELFVDEKQGYAKGVLTQKLGPWRRPVAYLSKKLDPVAAGWPPCLRMVAAIAVLTKDAGKLTMGQPLVILAPHAVEALVKQPPDRWLSNARMTHYQALLLDTDRVQFGPIVALNPATLLPLPEEGLQHDCLDILAEAHGTRPDLTDQPLPDADHTWYTDGSSFLQEGQRKAGAAVTTETEVVWAKALPAGTSAQRAELIALTQALKMAEGKKLNVYTDSRYAFATAHIHGEIYRRRGWLTSEGKEIKNKDEILALLKALFLPKRLSIIHCPGHQKGNRAEARGNRMADQAAREVATRETPETSTLLAGKRTADGSEFEKRTADGSEFESPKKKAKVE

SEQ ID NO: 7061 - protein, 2116 aa, synthetic construct
MPAAKRVKLDGGDKKYSIGLDIGTNSVGWAVITDEYKVPSKKFKVLGNTDRHSIKKNLIGALLFDSGETAEATRLKRTARRRYTRRKNRICYLQEIFSNEMAKVDDSFFHRLEESFLVEEDKKHERHPIFGNIVDEVAYHEKYPTIYHLRKKLVDSTDKADLRLIYLALAHMIKFRGHFLIEGDLNPDNSDVDKLFIQLVQTYNQLFEENPINASGVDAKAILSARLSKSRRLENLIAQLPGEKKNGLFGNLIALSLGLTPNFKSNFDLAEDAKLQLSKDTYDDDLDNLLAQIGDQYADLFLAAKNLSDAILLSDILRVNTEITKAPLSASMIKRYDEHHQDLTLLKALVRQQLPEKYKEIFFDQSKNGYAGYIDGGASQEEFYKFIKPILEKMDGTEELLVKLNREDLLRKQRTFDNGSIPHQIHLGELHAILRRQEDFYPFLKDNREKIEKILTFRIPYYVGPLARGNSRFAWMTRKSEETITPWNFEEVVDKGASAQSFIERMTNFDKNLPNEKVLPKHSLLYEYFTVYNELTKVKYVTEGMRKPAFLSGEQKKAIVDLLFKTNRKVTVKQLKEDYFKKIECFDSVEISGVEDRFNASLGTYHDLLKIIKDKDFLDNEENEDILEDIVLTLTLFEDREMIEERLKTYAHLFDDKVMKQLKRRRYTGWGRLSRKLINGIRDKQSGKTILDFLKSDGFANRNFMQLIHDDSLTFKEDIQKAQVSGQGDSLHEHIANLAGSPAIKKGILQTVKVVDELVKVMGRHKPENIVIEMARENQTTQKGQKNSRERMKRIEEGIKELGSQILKEHPVENTQLQNEKLYLYYLQNGRDMYVDQELDINRLSDYDVDHIVPQSFLKDDSIDNKVLTRSDKARGKSDNVPSEEVVKKMKNYWRQLLNAKLITQRKFDNLTKAERGGLSELDKAGFIKRQLVETRQITKHVAQILDSRMNTKYDENDKLIREVKVITLKSKLVSDFRKDFQFYKVREINNYHHAHDAYLNAVVGTALIKKYPKLESEFVYGDYKVYDVRKMIAKSEQEIGKATAKYFFYSNIMNFFKTEITLANGEIRKRPLIETNGETGEIVWDKGRDFATVRKVLSMPQVNIVKKTEVQTGGFSKESILPKRNSDKLIARKKDWDPKKYGGFDSPTVAYSVLVVAKVEKGKSKKLKSVKELLGITIMERSSFEKNPIDFLEAKGYKEVKKDLIIKLPKYSLFELENGRKRMLASAGELQKGNELALPSKYVNFLYLASHYEKLKGSPEDNEQKQLFVEQHKHYLDEIIEQISEFSKRVILADANLDKVLSAYNKHRDKPIREQAENIIHLFTLTNLGAPAAFKYFDTTIDRKRYTSTKEVLDATLIHQSITGLYETRIDLSQLGGDGGGGSEAAAKGSSGGWVQEISDSRPMLHIYLNGRRFLGLLNTGADKTCIAGRDWPANWPIHQTESSLQGLGMACGVARSSQPLRWQHEDKSGIIHPFVIPTLPFTLWGRDIMKDIKVRLMTDSPDDSQDLMIGAIESNLFADQISWKSDQPVWLNQWPLKQEKLQALQQLVTEQLQLGHLEESNSPWNTPVFVIKKKSGKWRLLQDLRAVNATMHDMGALQPGLPSPVAVPKGWEIIIIDLQDCFFNIKLHPEDCKRFAFSVPSPNFKRPYQRFQWKVLPQGMKNSPTLCQKFVDKAILTVRDKYQDSYIVHYMDDILLAHPSRSIVDEILTSMIQALNKHGLVVSTEKIQKYDNLKYLGTHIQGDSVSYQKLQIRTDKLRTLNDFQKLLGNINWIRPFLKLTTGELKPLFEILNGDSNPISTRKLTPEACKALQLMNERLSTARVKRLDLSQPWSLCILKTEYTPTACLWQDGVVEWIHLPHISPKVITPYDIFCTQLIIKGRHRSKELFSKDPDYIVVPYTKVQFDLLLQEKEDWPISLLGFLGEVHFHLPKDPLLTFTLQTAIIFPHMTSTTPLEKGIVIFTDGSANGRSVTYIQGREPIIKENTQNTAQQAEIVAVITAFEEVSQPFNLYTDSKYVTGLFPEIETATLSPRTKIYTELKHLQRLIHKRQEKFYIGHIRGHTGLPGPLAQGNAYADSLTRILTAGKRTADGSEFEKRTADGSEFESPKKKAKVE

SEQ ID NO: 7062 - protein, 2090 aa, synthetic construct
MPAAKRVKLDGGDKKYSIGLDIGTNSVGWAVITDEYKVPSKKFKVLGNTDRHSIKKNLIGALLFDSGETAEATRLKRTARRRYTRRKNRICYLQEIFSNEMAKVDDSFFHRLEESFLVEEDKKHERHPIFGNIVDEVAYHEKYPTIYHLRKKLVDSTDKADLRLIYLALAHMIKFRGHFLIEGDLNPDNSDVDKLFIQLVQTYNQLFEENPINASGVDAKAILSARLSKSRRLENLIAQLPGEKKNGLFGNLIALSLGLTPNFKSNFDLAEDAKLQLSKDTYDDDLDNLLAQIGDQYADLFLAAKNLSDAILLSDILRVNTEITKAPLSASMIKRYDEHHQDLTLLKALVRQQLPEKYKEIFFDQSKNGYAGYIDGGASQEEFYKFIKPILEKMDGTEELLVKLNREDLLRKQRTFDNGSIPHQIHLGELHAILRRQEDFYPFLKDNREKIEKILTFRIPYYVGPLARGNSRFAWMTRKSEETITPWNFEEVVDKGASAQSFIERMTNFDKNLPNEKVLPKHSLLYEYFTVYNELTKVKYVTEGMRKPAFLSGEQKKAIVDLLFKTNRKVTVKQLKEDYFKKIECFDSVEISGVEDRFNASLGTYHDLLKIIKDKDFLDNEENEDILEDIVLTLTLFEDREMIEERLKTYAHLFDDKVMKQLKRRRYTGWGRLSRKLINGIRDKQSGKTILDFLKSDGFANRNFMQLIHDDSLTFKEDIQKAQVSGQGDSLHEHIANLAGSPAIKKGILQTVKVVDELVKVMGRHKPENIVIEMARENQTTQKGQKNSRERMKRIEEGIKELGSQILKEHPVENTQLQNEKLYLYYLQNGRDMYVDQELDINRLSDYDVDHIVPQSFLKDDSIDNKVLTRSDKARGKSDNVPSEEVVKKMKNYWRQLLNAKLITQRKFDNLTKAERGGLSELDKAGFIKRQLVETRQITKHVAQILDSRMNTKYDENDKLIREVKVITLKSKLVSDFRKDFQFYKVREINNYHHAHDAYLNAVVGTALIKKYPKLESEFVYGDYKVYDVRKMIAKSEQEIGKATAKYFFYSNIMNFFKTEITLANGEIRKRPLIETNGETGEIVWDKGRDFATVRKVLSMPQVNIVKKTEVQTGGFSKESILPKRNSDKLIARKKDWDPKKYGGFDSPTVAYSVLVVAKVEKGKSKKLKSVKELLGITIMERSSFEKNPIDFLEAKGYKEVKKDLIIKLPKYSLFELENGRKRMLASAGELQKGNELALPSKYVNFLYLASHYEKLKGSPEDNEQKQLFVEQHKHYLDEIIEQISEFSKRVILADANLDKVLSAYNKHRDKPIREQAENIIHLFTLTNLGAPAAFKYFDTTIDRKRYTSTKEVLDATLIHQSITGLYETRIDLSQLGGDGGGGSEAAAKGSSGGTLQLDDEYRLYSPLVKPDQNIQFWLEQFPQAWAETAGMGLAKQVPPQVIQLKASATPVSVRQYPLSKEAQEGIRPHVQRLIQQGILVPVQSPWNTPLLPVRKPGTNDYRPVQDLREVNKRVQDIHPTVPNPYNLLCALPPQRSWYTVLDLKDAFFCLRLHPTSQPLFAFEWRDPGTGRTGQLTWTRLPQGFKNSPTIFDEALHRDLANFRIQHPQVTLLQYVDDLLLAGATKQDCLEGTKALLLELSDLGYRASAKKAQICRREVTYLGYSLRDGQRWLTEARKKTVVQIPAPTTAKQVREFLGTAGFCRLWIPGFATLAAPLYPLTKEKGEFSWAPEHQKAFDAIKKALLSAPALALPDVTKPFTLYVDERKGVARGVLTQTLGPWRRPVAYLSKKLDPVASGWPVCLKAIAAVAILVKDADKLTLGQNITVIAPHALENIVRQPPDRWMTNARMTHYQSLLLTERVTFAPPAALNPATLLPEETDEPVTHDCHQLLIEETGVRKDLTDIPLTGEVLTWFTDGSSYVVEGKRMAGAAVVDGTRTIWASSLPEGTSAQKAELMALTQALRLAEGKSINIYTDSRYAFATAHVHGAIYKQRGLLTSAGREIKNKEEILSLLEALHLPKRLAIIHCPGHQKAKDPISRGNQMADRVAKQAAQGVNLLAGKRTADGSEFEKRTADGSEFESPKKKAKVE

SEQ ID NO: 7063 - protein, 2090 aa, synthetic construct; identical to SEQ ID NO: 7062

SEQ ID NO: 7064 - protein, 2094 aa, synthetic construct
MPAAKRVKLDGGDKKYSIGLDIGTNSVGWAVITDEYKVPSKKFKVLGNTDRHSIKKNLIGALLFDSGETAEATRLKRTARRRYTRRKNRICYLQEIFSNEMAKVDDSFFHRLEESFLVEEDKKHERHPIFGNIVDEVAYHEKYPTIYHLRKKLVDSTDKADLRLIYLALAHMIKFRGHFLIEGDLNPDNSDVDKLFIQLVQTYNQLFEENPINASGVDAKAILSARLSKSRRLENLIAQLPGEKKNGLFGNLIALSLGLTPNFKSNFDLAEDAKLQLSKDTYDDDLDNLLAQIGDQYADLFLAAKNLSDAILLSDILRVNTEITKAPLSASMIKRYDEHHQDLTLLKALVRQQLPEKYKEIFFDQSKNGYAGYIDGGASQEEFYKFIKPILEKMDGTEELLVKLNREDLLRKQRTFDNGSIPHQIHLGELHAILRRQEDFYPFLKDNREKIEKILTFRIPYYVGPLARGNSRFAWMTRKSEETITPWNFEEVVDKGASAQSFIERMTNFDKNLPNEKVLPKHSLLYEYFTVYNELTKVKYVTEGMRKPAFLSGEQKKAIVDLLFKTNRKVTVKQLKEDYFKKIECFDSVEISGVEDRFNASLGTYHDLLKIIKDKDFLDNEENEDILEDIVLTLTLFEDREMIEERLKTYAHLFDDKVMKQLKRRRYTGWGRLSRKLINGIRDKQSGKTILDFLKSDGFANRNFMQLIHDDSLTFKEDIQKAQVSGQGDSLHEHIANLAGSPAIKKGILQTVKVVDELVKVMGRHKPENIVIEMARENQTTQKGQKNSRERMKRIEEGIKELGSQILKEHPVENTQLQNEKLYLYYLQNGRDMYVDQELDINRLSDYDVDHIVPQSFLKDDSIDNKVLTRSDKARGKSDNVPSEEVVKKMKNYWRQLLNAKLITQRKFDNLTKAERGGLSELDKAGFIKRQLVETRQITKHVAQILDSRMNTKYDENDKLIREVKVITLKSKLVSDFRKDFQFYKVREINNYHHAHDAYLNAVVGTALIKKYPKLESEFVYGDYKVYDVRKMIAKSEQEIGKATAKYFFYSNIMNFFKTEITLANGEIRKRPLIETNGETGEIVWDKGRDFATVRKVLSMPQVNIVKKTEVQTGGFSKESILPKRNSDKLIARKKDWDPKKYGGFDSPTVAYSVLVVAKVEKGKSKKLKSVKELLGITIMERSSFEKNPIDFLEAKGYKEVKKDLIIKLPKYSLFELENGRKRMLASAGELQKGNELALPSKYVNFLYLASHYEKLKGSPEDNEQKQLFVEQHKHYLDEIIEQISEFSKRVILADANLDKVLSAYNKHRDKPIREQAENIIHLFTLTNLGAPAAFKYFDTTIDRKRYTSTKEVLDATLIHQSITGLYETRIDLSQLGGDGGGGSEAAAKGSSGGVLNLEEEYRLHEKPVPSSIDPSWLQLFPTVWAERAGMGLANQVPPVVVELRSGASPVAVRQYPMSKEAREGIRPHIQRFLDLGVLVPCQSPWNTPLLPVKKPGTNDYRPVQDLREINKRVQDIHPTVPNPYNLLSSLPPSHTWYSVLDLKDAFFCLKLHPNSQPLFAFEWRDPEKGNTGQLTWTRLPQGFKNSPTLFNEALHRDLAPFRALNPQVVLLQYVDDLLVAAPTYRDCKEGTQKLLQELSKLGYRVSAKKAQLCQKEVTYLGYLLKEGKRWLTPARKATVMKIPPPTTPRQVREFLGTAGFCRLWIPGFASLAAPLYPLTKPSIPFIWTEEHQKAFDRIKEALLSAPALALPDLTKPFTLYVDERAGVARGVLTQTLGPWRRPVAYLSKKLDPVASGWPTCLKAVAAVALLLKDADKLTLGQNVTVIASHSLESIVRQPPDRWMTNARMTHYQSLLLNERVSFAPPAVLNPATLLPVESEATPVHRCSEILAEETGTRRDLKDQPLPGVPAWYTDGSSFIAEGKRRAGAAIVDGKRTVWASSLPEGTSAQKAELVALTQALRLAEGKDINIYTDSRYAFATAHIHGAIYKQRGWLTSAGKDIKNKEEILALLEAIHLPKRVAIIHCPGHQKGNDPVATGNRRADEAAKQAALSTRVLAETTKPAGKRTADGSEFEKRTADGSEFESPKKKAKVE

SEQ ID NO: 7065 - protein, 2094 aa, synthetic construct
MPAAKRVKLDGGDKKYSIGLDIGTNSVGWAVITDEYKVPSKKFKVLGNTDRHSIKKNLIGALLFDSGETAEATRLKRTARRRYTRRKNRICYLQEIFSNEMAKVDDSFFHRLEESFLVEEDKKHERHPIFGNIVDEVAYHEKYPTIYHLRKKLVDSTDKADLRLIYLALAHMIKFRGHFLIEGDLNPDNSDVDKLFIQLVQTYNQLFEENPINASGVDAKAILSARLSKSRRLENLIAQLPGEKKNGLFGNLIALSLGLTPNFKSNFDLAEDAKLQLSKDTYDDDLDNLLAQIGDQYADLFLAAKNLSDAILLSDILRVNTEITKAPLSASMIKRYDEHHQDLTLLKALVRQQLPEKYKEIFFDQSKNGYAGYIDGGASQEEFYKFIKPILEKMDGTEELLVKLNREDLLRKQRTFDNGSIPHQIHLGELHAILRRQEDFYPFLKDNREKIEKILTFRIPYYVGPLARGNSRFAWMTRKSEETITPWNFEEVVDKGASAQSFIERMTNFDKNLPNEKVLPKHSLLYEYFTVYNELTKVKYVTEGMRKPAFLSGEQKKAIVDLLFKTNRKVTVKQLKEDYFKKIECFDSVEISGVEDRFNASLGTYHDLLKIIKDKDFLDNEENEDILEDIVLTLTLFEDREMIEERLKTYAHLFDDKVMKQLKRRRYTGWGRLSRKLINGIRDKQSGKTILDFLKSDGFANRNFMQLIHDDSLTFKEDIQKAQVSGQGDSLHEHIANLAGSPAIKKGILQTVKVVDELVKVMGRHKPENIVIEMARENQTTQKGQKNSRERMKRIEEGIKELGSQILKEHPVENTQLQNEKLYLYYLQNGRDMYVDQELDINRLSDYDVDHIVPQSFLKDDSIDNKVLTRSDKARGKSDNVPSEEVVKKMKNYWRQLLNAKLITQRKFDNLTKAERGGLSELDKAGFIKRQLVETRQITKHVAQILDSRMNTKYDENDKLIREVKVITLKSKLVSDFRKDFQFYKVREINNYHHAHDAYLNAVVGTALIKKYPKLESEFVYGDYKVYDVRKMIAKSEQEIGKATAKYFFYSNIMNFFKTEITLANGEIRKRPLIETNGETGEIVWDKGRDFATVRKVLSMPQVNIVKKTEVQTGGFSKESILPKRNSDKLIARKKDWDPKKYGGFDSPTVAYSVLVVAKVEKGKSKKLKSVKELLGITIMERSSFEKNPIDFLEAKGYKEVKKDLIIKLPKYSLFELENGRKRMLASAGELQKGNELALPSKYVNFLYLASHYEKLKGSPEDNEQKQLFVEQHKHYLDEIIEQISEFSKRVILADANLDKVLSAYNKHRDKPIREQAENIIHLFTLTNLGAPAAFKYFDTTIDRKRYTSTKEVLDATLIHQSITGLYETRIDLSQLGGDGGGGSEAAAKGSSGGVLNLEEEYRLHEKPVPSSIDPSWLQLFPTVWAERAGMGLANQVPPVVVELRSGASPVAVRQYPMSKEAREGIRPHIQRFLDLGVLVPCQSPWNTPLLPVKKPGTNDYRPVQDLREINKRVQDIHPTVPNPYNLLSSLPPSHTWYSVLDLKDAFFCLKLHPNSQPLFAFEWRDPEKGNTGQLTWTRLPQGFKNSPTLFNEALHRDLAPFRALNPQVVLLQYVDDLLVAAPTYRDCKEGTQKLLQELSKLGYRVSAKKAQLCQKEVTYLGYLLKEGKRWLTPARKATVMKIPPPTTPRQVREFLGKAGFCRLFIPGFASLAAPLYPLTKPSIPFIWTEEHQKAFDRIKEALLSAPALALPDLTKPFTLYVDERAGVARGVLTQTLGPWRRPVAYLSKKLDPVASGWPTCLKAVAAVALLLKDADKLTLGQNVTVIASHSLESIVRQPPDRWMTNARMTHYQSLLLNERVSFAPPAVLNPATLLPVESEATPVHRCSEILAEETGTRRDLKDQPLPGVPAWYTDGSSFIAEGKRRAGAAIVDGKRTVWASSLPEGTSAQKAELVALTQALRLAEGKDINIYTDSRYAFATAHIHGAIYKQRGWLTSAGKDIKNKEEILALLEAIHLPKRVAIIHCPGHQKGNDPVATGNRRADEAAKQAALSTRVLAETTKPAGKRTADGSEFEKRTADGSEFESPKKKAKVE

SEQ ID NO: 7066 - protein, 2096 aa, synthetic construct
MPAAKRVKLDGGDKKYSIGLDIGTNSVGWAVITDEYKVPSKKFKVLGNTDRHSIKKNLIGALLFDSGETAEATRLKRTARRRYTRRKNRICYLQEIFSNEMAKVDDSFFHRLEESFLVEEDKKHERHPIFGNIVDEVAYHEKYPTIYHLRKKLVDSTDKADLRLIYLALAHMIKFRGHFLIEGDLNPDNSDVDKLFIQLVQTYNQLFEENPINASGVDAKAILSARLSKSRRLENLIAQLPGEKKNGLFGNLIALSLGLTPNFKSNFDLAEDAKLQLSKDTYDDDLDNLLAQIGDQYADLFLAAKNLSDAILLSDILRVNTEITKAPLSASMIKRYDEHHQDLTLLKALVRQQLPEKYKEIFFDQSKNGYAGYIDGGASQEEFYKFIKPILEKMDGTEELLVKLNREDLLRKQRTFDNGSIPHQIHLGELHAILRRQEDFYPFLKDNREKIEKILTFRIPYYVGPLARGNSRFAWMTRKSEETITPWNFEEVVDKGASAQSFIERMTNFDKNLPNEKVLPKHSLLYEYFTVYNELTKVKYVTEGMRKPAFLSGEQKKAIVDLLFKTNRKVTVKQLKEDYFKKIECFDSVEISGVEDRFNASLGTYHDLLKIIKDKDFLDNEENEDILEDIVLTLTLFEDREMIEERLKTYAHLFDDKVMKQLKRRRYTGWGRLSRKLINGIRDKQSGKTILDFLKSDGFANRNFMQLIHDDSLTFKEDIQKAQVSGQGDSLHEHIANLAGSPAIKKGILQTVKVVDELVKVMGRHKPENIVIEMARENQTTQKGQKNSRERMKRIEEGIKELGSQILKEHPVENTQLQNEKLYLYYLQNGRDMYVDQELDINRLSDYDVDHIVPQSFLKDDSIDNKVLTRSDKARGKSDNVPSEEVVKKMKNYWRQLLNAKLITQRKFDNLTKAERGGLSELDKAGFIKRQLVETRQITKHVAQILDSRMNTKYDENDKLIREVKVITLKSKLVSDFRKDFQFYKVREINNYHHAHDAYLNAVVGTALIKKYPKLESEFVYGDYKVYDVRKMIAKSEQEIGKATAKYFFYSNIMNFFKTEITLANGEIRKRPLIETNGETGEIVWDKGRDFATVRKVLSMPQVNIVKKTEVQTGGFSKESILPKRNSDKLIARKKDWDPKKYGGFDSPTVAYSVLVVAKVEKGKSKKLKSVKELLGITIMERSSFEKNPIDFLEAKGYKEVKKDLIIKLPKYSLFELENGRKRMLASAGELQKGNELALPSKYVNFLYLASHYEKLKGSPEDNEQKQLFVEQHKHYLDEIIEQISEFSKRVILADANLDKVLSAYNKHRDKPIREQAENIIHLFTLTNLGAPAAFKYFDTTIDRKRYTSTKEVLDATLIHQSITGLYETRIDLSQLGGDGGGGSEAAAKGSSGGTLNIEDEYRLHETSKEPDVPLGSTWLSDFPQAWAETGGMGLAVRQAPLIIPLKATSTPVSIKQYPMSQEARLGIKPHIQRLLDQGILVPCQSPWNTPLLPVKKPGTNDYRPVQDLREVNKRVEDIHPTVPNPYNLLSGLPPSHQWYTVLDLKDAFFCLRLHPTSQPLFAFEWRDPEMGISGQLTWTRLPQGFKNSPTLFNEALHRDLADFRIQHPDLILLQYVDDLLLAATSEQDCQRGTRALLQTLGNLGYRASAKKAQICQKQVKYLGYLLKEGQRWLTEARKETVMGQPTPKTPRQLREFLGTAGFCRLWIPGFAEMAAPLYPLTKPGTLFNWGPDQQKAYQEIKQALLTAPALGLPDLTKPFELFVDEKQGYAKGVLTQKLGPWRRPVAYLSKKLDPVAAGWPPCLRMVAAIAVLTKDAGKLTMGQPLVILAPHAVEALVKQPPDRWLSNARMTHYQAMLLDTDRVQFGPVVALNPATLLPLPEKEAPHDCLEILAETHGTRPDLTDQPIPDADYTWYTDGSSFLQEGQRRAGAAVTTETEVIWARALPAGTSAQRAELIALTQALKMAEGKKLNVYTDSRYAFATAHVHGEIYRRRGWLTSEGREIKNKNEILALLKALFLPKRLSIIHCPGHQKGNSAEARGNRMADQAAREAAMKAVLETSTLLAGKRTADGSEFEKRTADGSEFESPKKKAKVE

SEQ ID NO: 7067 - protein, 2096 aa, synthetic construct; identical to SEQ ID NO: 4522

SEQ ID NO: 7068 - protein, 2098 aa, synthetic construct
MPAAKRVKLDGGDKKYSIGLDIGTNSVGWAVITDEYKVPSKKFKVLGNTDRHSIKKNLIGALLFDSGETAEATRLKRTARRRYTRRKNRICYLQEIFSNEMAKVDDSFFHRLEESFLVEEDKKHERHPIFGNIVDEVAYHEKYPTIYHLRKKLVDSTDKADLRLIYLALAHMIKFRGHFLIEGDLNPDNSDVDKLFIQLVQTYNQLFEENPINASGVDAKAILSARLSKSRRLENLIAQLPGEKKNGLFGNLIALSLGLTPNFKSNFDLAEDAKLQLSKDTYDDDLDNLLAQIGDQYADLFLAAKNLSDAILLSDILRVNTEITKAPLSASMIKRYDEHHQDLTLLKALVRQQLPEKYKEIFFDQSKNGYAGYIDGGASQEEFYKFIKPILEKMDGTEELLVKLNREDLLRKQRTFDNGSIPHQIHLGELHAILRRQEDFYPFLKDNREKIEKILTFRIPYYVGPLARGNSRFAWMTRKSEETITPWNFEEVVDKGASAQSFIERMTNFDKNLPNEKVLPKHSLLYEYFTVYNELTKVKYVTEGMRKPAFLSGEQKKAIVDLLFKTNRKVTVKQLKEDYFKKIECFDSVEISGVEDRFNASLGTYHDLLKIIKDKDFLDNEENEDILEDIVLTLTLFEDREMIEERLKTYAHLFDDKVMKQLKRRRYTGWGRLSRKLINGIRDKQSGKTILDFLKSDGFANRNFMQLIHDDSLTFKEDIQKAQVSGQGDSLHEHIANLAGSPAIKKGILQTVKVVDELVKVMGRHKPENIVIEMARENQTTQKGQKNSRERMKRIEEGIKELGSQILKEHPVENTQLQNEKLYLYYLQNGRDMYVDQELDINRLSDYDVDHIVPQSFLKDDSIDNKVLTRSDKARGKSDNVPSEEVVKKMKNYWRQLLNAKLITQRKFDNLTKAERGGLSELDKAGFIKRQLVETRQITKHVAQILDSRMNTKYDENDKLIREVKVITLKSKLVSDFRKDFQFYKVREINNYHHAHDAYLNAVVGTALIKKYPKLESEFVYGDYKVYDVRKMIAKSEQEIGKATAKYFFYSNIMNFFKTEITLANGEIRKRPLIETNGETGEIVWDKGRDFATVRKVLSMPQVNIVKKTEVQTGGFSKESILPKRNSDKLIARKKDWDPKKYGGFDSPTVAYSVLVVAKVEKGKSKKLKSVKELLGITIMERSSFEKNPIDFLEAKGYKEVKKDLIIKLPKYSLFELENGRKRMLASAGELQKGNELALPSKYVNFLYLASHYEKLKGSPEDNEQKQLFVEQHKHYLDEIIEQISEFSKRVILADANLDKVLSAYNKHRDKPIREQAENIIHLFTLTNLGAPAAFKYFDTTIDRKRYTSTKEVLDATLIHQSITGLYETRIDLSQLGGDGGGSSGGSEAAAKGGTAPLEEEYRLFLEAPIQNVTLLEQWKREIPKVWAEINPPGLASTQAPIHVQLLSTALPVRVRQYPITLEAKRSLRETIRKFRAAGILRPVHSPWNTPLLPVRKSGTSEYRMVQDLREVNKRVETIHPTVPNPYTLLSLLPPDRIWYSVLDLKDAFFCIPLAPESQLIFAFEWADAEEGESGQLTWTRLPQGFKNSPTLFNEALNRDLQGFRLDHPSVSLLQYVDDLLIAADTQAACLSATRDLLMTLAELGYRVSGKKAQLCQEEVTYLGFKIHKGSRSLSNSRTQAILQIPVPKTKRQVREFLGTIGYCRLWIPGFAELAQPLYAATRPGNDPLVWGEKEEEAFQSLKLALTQPPALALPSLDKPFQLFVEETSGAAKGVLTQALGPWKRPVAYLSKRLDPVAAGWPRCLRAIAAAALLTREASKLTFGQDIEITSSHNLESLLRSPPDKWLTNARITQYQVLLLDPPRVRFKQTAALNPATLLPETDDTLPIHHCLDTLDSLTSTRPDLTDQPLAQAEATLFTDGSSYIRDGKRYAGAAVVTLDSVIWAEPLPIGTSAQKAELIALTKALEWSKDKSVNIYTDSRYAFATLHVHGMIYRERGWLTAGGKAIKNAPEILALLTAVWLPKRVAVMHCKGHQKDDAPTSTGNRRADEVAREVAIRPLSTQATISAGKRTADGSEFEKRTADGSEFESPKKKAKVE

SEQ ID NO: 7069 - protein, 2098 aa, synthetic construct
MPAAKRVKLDGGDKKYSIGLDIGTNSVGWAVITDEYKVPSKKFKVLGNTDRHSIKKNLIGALLFDSGETAEATRLKRTARRRYTRRKNRICYLQEIFSNEMAKVDDSFFHRLEESFLVEEDKKHERHPIFGNIVDEVAYHEKYPTIYHLRKKLVDSTDKADLRLIYLALAHMIKFRGHFLIEGDLNPDNSDVDKLFIQLVQTYNQLFEENPINASGVDAKAILSARLSKSRRLENLIAQLPGEKKNGLFGNLIALSLGLTPNFKSNFDLAEDAKLQLSKDTYDDDLDNLLAQIGDQYADLFLAAKNLSDAILLSDILRVNTEITKAPLSASMIKRYDEHHQDLTLLKALVRQQLPEKYKEIFFDQSKNGYAGYIDGGASQEEFYKFIKPILEKMDGTEELLVKLNREDLLRKQRTFDNGSIPHQIHLGELHAILRRQEDFYPFLKDNREKIEKILTFRIPYYVGPLARGNSRFAWMTRKSEETITPWNFEEVVDKGASAQSFIERMTNFDKNLPNEKVLPKHSLLYEYFTVYNELTKVKYVTEGMRKPAFLSGEQKKAIVDLLFKTNRKVTVKQLKEDYFKKIECFDSVEISGVEDRFNASLGTYHDLLKIIKDKDFLDNEENEDILEDIVLTLTLFEDREMIEERLKTYAHLFDDKVMKQLKRRRYTGWGRLSRKLINGIRDKQSGKTILDFLKSDGFANRNFMQLIHDDSLTFKEDIQKAQVSGQGDSLHEHIANLAGSPAIKKGILQTVKVVDELVKVMGRHKPENIVIEMARENQTTQKGQKNSRERMKRIEEGIKELGSQILKEHPVENTQLQNEKLYLYYLQNGRDMYVDQELDINRLSDYDVDHIVPQSFLKDDSIDNKVLTRSDKARGKSDNVPSEEVVKKMKNYWRQLLNAKLITQRKFDNLTKAERGGLSELDKAGFIKRQLVETRQITKHVAQILDSRMNTKYDENDKLIREVKVITLKSKLVSDFRKDFQFYKVREINNYHHAHDAYLNAVVGTALIKKYPKLESEFVYGDYKVYDVRKMIAKSEQEIGKATAKYFFYSNIMNFFKTEITLANGEIRKRPLIETNGETGEIVWDKGRDFATVRKVLSMPQVNIVKKTEVQTGGFSKESILPKRNSDKLIARKKDWDPKKYGGFDSPTVAYSVLVVAKVEKGKSKKLKSVKELLGITIMERSSFEKNPIDFLEAKGYKEVKKDLIIKLPKYSLFELENGRKRMLASAGELQKGNELALPSKYVNFLYLASHYEKLKGSPEDNEQKQLFVEQHKHYLDEIIEQISEFSKRVILADANLDKVLSAYNKHRDKPIREQAENIIHLFTLTNLGAPAAFKYFDTTIDRKRYTSTKEVLDATLIHQSITGLYETRIDLSQLGGDGGGSSGGSEAAAKGGTAPLEEEYRLFLEAPIQNVTLLEQWKREIPKVWAEINPPGLASTQAPIHVQLLSTALPVRVRQYPITLEAKRSLRETIRKFRAAGILRPVHSPWNTPLLPVRKSGTSEYRMVQDLREVNKRVETIHPTVPNPYTLLSLLPPDRIWYSVLDLKDAFFCIPLAPESQLIFAFEWADAEEGESGQLTWTRLPQGFKNSPTLFNEALNRDLQGFRLDHPSVSLLQYVDDLLIAADTQAACLSATRDLLMTLAELGYRVSGKKAQLCQEEVTYLGFKIHKGSRSLSNSRTQAILQIPVPKTKRQVREFLGKIGYCRLFIPGFAELAQPLYAATRPGNDPLVWGEKEEEAFQSLKLALTQPPALALPSLDKPFQLFVEETSGAAKGVLTQALGPWKRPVAYLSKRLDPVAAGWPRCLRAIAAAALLTREASKLTFGQDIEITSSHNLESLLRSPPDKWLTNARITQYQVLLLDPPRVRFKQTAALNPATLLPETDDTLPIHHCLDTLDSLTSTRPDLTDQPLAQAEATLFTDGSSYIRDGKRYAGAAVVTLDSVIWAEPLPIGTSAQKAELIALTKALEWSKDKSVNIYTDSRYAFATLHVHGMIYRERGWLTAGGKAIKNAPEILALLTAVWLPKRVAVMHCKGHQKDDAPTSTGNRRADEVAREVAIRPLSTQATISAGKRTADGSEFEKRTADGSEFESPKKKAKVE

SEQ ID NO: 7070 - protein, 2095 aa, synthetic construct
MPAAKRVKLDGGDKKYSIGLDIGTNSVGWAVITDEYKVPSKKFKVLGNTDRHSIKKNLIGALLFDSGETAEATRLKRTARRRYTRRKNRICYLQEIFSNEMAKVDDSFFHRLEESFLVEEDKKHERHPIFGNIVDEVAYHEKYPTIYHLRKKLVDSTDKADLRLIYLALAHMIKFRGHFLIEGDLNPDNSDVDKLFIQLVQTYNQLFEENPINASGVDAKAILSARLSKSRRLENLIAQLPGEKKNGLFGNLIALSLGLTPNFKSNFDLAEDAKLQLSKDTYDDDLDNLLAQIGDQYADLFLAAKNLSDAILLSDILRVNTEITKAPLSASMIKRYDEHHQDLTLLKALVRQQLPEKYKEIFFDQSKNGYAGYIDGGASQEEFYKFIKPILEKMDGTEELLVKLNREDLLRKQRTFDNGSIPHQIHLGELHAILRRQEDFYPFLKDNREKIEKILTFRIPYYVGPLARGNSRFAWMTRKSEETITPWNFEEVVDKGASAQSFIERMTNFDKNLPNEKVLPKHSLLYEYFTVYNELTKVKYVTEGMRKPAFLSGEQKKAIVDLLFKTNRKVTVKQLKEDYFKKIECFDSVEISGVEDRFNASLGTYHDLLKIIKDKDFLDNEENEDILEDIVLTLTLFEDREMIEERLKTYAHLFDDKVMKQLKRRRYTGWGRLSRKLINGIRDKQSGKTILDFLKSDGFANRNFMQLIHDDSLTFKEDIQKAQVSGQGDSLHEHIANLAGSPAIKKGILQTVKVVDELVKVMGRHKPENIVIEMARENQTTQKGQKNSRERMKRIEEGIKELGSQILKEHPVENTQLQNEKLYLYYLQNGRDMYVDQELDINRLSDYDVDHIVPQSFLKDDSIDNKVLTRSDKARGKSDNVPSEEVVKKMKNYWRQLLNAKLITQRKFDNLTKAERGGLSELDKAGFIKRQLVETRQITKHVAQILDSRMNTKYDENDKLIREVKVITLKSKLVSDFRKDFQFYKVREINNYHHAHDAYLNAVVGTALIKKYPKLESEFVYGDYKVYDVRKMIAKSEQEIGKATAKYFFYSNIMNFFKTEITLANGEIRKRPLIETNGETGEIVWDKGRDFATVRKVLSMPQVNIVKKTEVQTGGFSKESILPKRNSDKLIARKKDWDPKKYGGFDSPTVAYSVLVVAKVEKGKSKKLKSVKELLGITIMERSSFEKNPIDFLEAKGYKEVKKDLIIKLPKYSLFELENGRKRMLASAGELQKGNELALPSKYVNFLYLASHYEKLKGSPEDNEQKQLFVEQHKHYLDEIIEQISEFSKRVILADANLDKVLSAYNKHRDKPIREQAENIIHLFTLTNLGAPAAFKYFDTTIDRKRYTSTKEVLDATLIHQSITGLYETRIDLSQLGGDGGGSSGGSEAAAKGGTLQLEEEYRLFEPESTQKQEMDIWLKNFPQAWAETGGMGTAHCQAPVLIQLKATATPISIRQYPMPHEAYQGIKPHIRRMLDQGILKPCQSPWNTPLLPVKKPGTEDYRPVQDLREVNKRVEDIHPTVPNPYNLLSTLPPSHPWYTVLDLKDAFFCLRLHSESQLLFAFEWRDPEIGLSGQLTWTRLPQGFKNSPTLFNEALHSDLADFRVRYPALVLLQYVDDLLLAAATRTECLEGTKALLETLGNKGYRASAKKAQICLQEVTYLGYSLKDGQRWLTKARKEAILSIPVPKNSRQVREFLGTAGYCRLWIPGFAELAAPLYPLTRPGTLFQWGTEQQLAFEDIKKALLSSPALGLPDITKPFELFIDENSGFAKGVLVQKLGPWKRPVAYLSKKLDTVASGWPPCLRMVAAIAILVKDAGKLTLGQPLTILTSHPVEALVRQPPNKWLSNARMTHYQAMLLDAERVHFGPTVSLNPATLLPLPSGGNHHDCLQILAETHGTRPDLTDQPLPDADLTWYTDGSSFIRNGEREAGAAVTTESEVIWAAPLPPGTSAQRAELIALTQALKMAEGKKLTVYTDSRYAFATTHVHGEIYRRRGWLTSEGKEIKNKNEILALLEALFLPKRLSIIHCPGHQKGDSPQAKGNRLADDTAKKAATETHSSLTVLPAGKRTADGSEFEKRTADGSEFESPKKKAKVE

SEQ ID NO: 7071 - protein, 2094 aa, synthetic construct
MPAAKRVKLDGGDKKYSIGLDIGTNSVGWAVITDEYKVPSKKFKVLGNTDRHSIKKNLIGALLFDSGETAEATRLKRTARRRYTRRKNRICYLQEIFSNEMAKVDDSFFHRLEESFLVEEDKKHERHPIFGNIVDEVAYHEKYPTIYHLRKKLVDSTDKADLRLIYLALAHMIKFRGHFLIEGDLNPDNSDVDKLFIQLVQTYNQLFEENPINASGVDAKAILSARLSKSRRLENLIAQLPGEKKNGLFGNLIALSLGLTPNFKSNFDLAEDAKLQLSKDTYDDDLDNLLAQIGDQYADLFLAAKNLSDAILLSDILRVNTEITKAPLSASMIKRYDEHHQDLTLLKALVRQQLPEKYKEIFFDQSKNGYAGYIDGGASQEEFYKFIKPILEKMDGTEELLVKLNREDLLRKQRTFDNGSIPHQIHLGELHAILRRQEDFYPFLKDNREKIEKILTFRIPYYVGPLARGNSRFAWMTRKSEETITPWNFEEVVDKGASAQSFIERMTNFDKNLPNEKVLPKHSLLYEYFTVYNELTKVKYVTEGMRKPAFLSGEQKKAIVDLLFKTNRKVTVKQLKEDYFKKIECFDSVEISGVEDRFNASLGTYHDLLKIIKDKDFLDNEENEDILEDIVLTLTLFEDREMIEERLKTYAHLFDDKVMKQLKRRRYTGWGRLSRKLINGIRDKQSGKTILDFLKSDGFANRNFMQLIHDDSLTFKEDIQKAQVSGQGDSLHEHIANLAGSPAIKKGILQTVKVVDELVKVMGRHKPENIVIEMARENQTTQKGQKNSRERMKRIEEGIKELGSQILKEHPVENTQLQNEKLYLYYLQNGRDMYVDQELDINRLSDYDVDHIVPQSFLKDDSIDNKVLTRSDKARGKSDNVPSEEVVKKMKNYWRQLLNAKLITQRKFDNLTKAERGGLSELDKAGFIKRQLVETRQITKHVAQILDSRMNTKYDENDKLIREVKVITLKSKLVSDFRKDFQFYKVREINNYHHAHDAYLNAVVGTALIKKYPKLESEFVYGDYKVYDVRKMIAKSEQEIGKATAKYFFYSNIMNFFKTEITLANGEIRKRPLIETNGETGEIVWDKGRDFATVRKVLSMPQVNIVKKTEVQTGGFSKESILPKRNSDKLIARKKDWDPKKYGGFDSPTVAYSVLVVAKVEKGKSKKLKSVKELLGITIMERSSFEKNPIDFLEAKGYKEVKKDLIIKLPKYSLFELENGRKRMLASAGELQKGNELALPSKYVNFLYLASHYEKLKGSPEDNEQKQLFVEQHKHYLDEIIEQISEFSKRVILADANLDKVLSAYNKHRDKPIREQAENIIHLFTLTNLGAPAAFKYFDTTIDRKRYTSTKEVLDATLIHQSITGLYETRIDLSQLGGDGGGSSGGSEAAAKGGVLNLEEEYRLHEKPVPSSIDPSWLQLFPTVWAERAGMGLANQVPPVVVELRSGASPVAVRQYPMSKEAREGIRPHIQKFLDLGVLVPCRSPWNTPLLPVKKPGTNDYRPVQDLREINKRVQDIHPTVPNPYNLLSSLPPSYTWYSVLDLKDAFFCLRLHPNSQPLFAFEWKDPEKGNTGQLTWTRLPQGFKNSPTLFNEALHRDLAPFRALNPQVVLLQYVDDLLVAAPTYEDCKKGTQKLLQELSKLGYRVSAKKAQLCQREVTYLGYLLKEGKRWLTPARKATVMKIPVPTTPRQVREFLGKAGFCRLFIPGFASLAAPLYPLTKPSIPFIWTEEHQQAFDHIKKALLSAPALALPDLTKPFTLYIDERAGVARGVLTQTLGPWRRPVAYLSKKLDPVASGWPTCLKAVAAVALLLKDADKLTLGQNVTVIASHSLESIVRQPPDRWMTNARMTHYQSLLLNERVSFAPPAVLNPATLLPVESEATPVHRCSEILAEETGTRRDLEDQPLPGVPTWYTDGSSFITEGKRRAGAPIVDGKRTVWASSLPEGTSAQKAELVALTQALRLAEGKNINIYTDSRYAFATAHIHGAIYKQRGWLTSAGKDIKNKEEILALLEAIHLPRRVAIIHCPGHQRGSNPVATGNRRADEAAKQAALSTRVLAGTTKPAGKRTADGSEFEKRTADGSEFESPKKKAKVE

SEQ ID NO: 7072 - protein, 2127 aa, synthetic construct
MPAAKRVKLDGGDKKYSIGLDIGTNSVGWAVITDEYKVPSKKFKVLGNTDRHSIKKNLIGALLFDSGETAEATRLKRTARRRYTRRKNRICYLQEIFSNEMAKVDDSFFHRLEESFLVEEDKKHERHPIFGNIVDEVAYHEKYPTIYHLRKKLVDSTDKADLRLIYLALAHMIKFRGHFLIEGDLNPDNSDVDKLFIQLVQTYNQLFEENPINASGVDAKAILSARLSKSRRLENLIAQLPGEKKNGLFGNLIALSLGLTPNFKSNFDLAEDAKLQLSKDTYDDDLDNLLAQIGDQYADLFLAAKNLSDAILLSDILRVNTEITKAPLSASMIKRYDEHHQDLTLLKALVRQQLPEKYKEIFFDQSKNGYAGYIDGGASQEEFYKFIKPILEKMDGTEELLVKLNREDLLRKQRTFDNGSIPHQIHLGELHAILRRQEDFYPFLKDNREKIEKILTFRIPYYVGPLARGNSRFAWMTRKSEETITPWNFEEVVDKGASAQSFIERMTNFDKNLPNEKVLPKHSLLYEYFTVYNELTKVKYVTEGMRKPAFLSGEQKKAIVDLLFKTNRKVTVKQLKEDYFKKIECFDSVEISGVEDRFNASLGTYHDLLKIIKDKDFLDNEENEDILEDIVLTLTLFEDREMIEERLKTYAHLFDDKVMKQLKRRRYTGWGRLSRKLINGIRDKQSGKTILDFLKSDGFANRNFMQLIHDDSLTFKEDIQKAQVSGQGDSLHEHIANLAGSPAIKKGILQTVKVVDELVKVMGRHKPENIVIEMARENQTTQKGQKNSRERMKRIEEGIKELGSQILKEHPVENTQLQNEKLYLYYLQNGRDMYVDQELDINRLSDYDVDHIVPQSFLKDDSIDNKVLTRSDKARGKSDNVPSEEVVKKMKNYWRQLLNAKLITQRKFDNLTKAERGGLSELDKAGFIKRQLVETRQITKHVAQILDSRMNTKYDENDKLIREVKVITLKSKLVSDFRKDFQFYKVREINNYHHAHDAYLNAVVGTALIKKYPKLESEFVYGDYKVYDVRKMIAKSEQEIGKATAKYFFYSNIMNFFKTEITLANGEIRKRPLIETNGETGEIVWDKGRDFATVRKVLSMPQVNIVKKTEVQTGGFSKESILPKRNSDKLIARKKDWDPKKYGGFDSPTVAYSVLVVAKVEKGKSKKLKSVKELLGITIMERSSFEKNPIDFLEAKGYKEVKKDLIIKLPKYSLFELENGRKRMLASAGELQKGNELALPSKYVNFLYLASHYEKLKGSPEDNEQKQLFVEQHKHYLDEIIEQISEFSKRVILADANLDKVLSAYNKHRDKPIREQAENIIHLFTLTNLGAPAAFKYFDTTIDRKRYTSTKEVLDATLIHQSITGLYETRIDLSQLGGDGGGSSGGSEAAAKGGLLGRDLLTKLKAQIQFSTEGPQVTWEDRPAMCLVLNLEEEYRLHEKPVPPSIDPSWLQLFPMVWAEKAGMGLANQVPPVVVELKSDASPVAVRQYPMSKEAREGIRPHIQRFLDLGILVPCQSPWNTPLLPVKKPGTNDYRPVQDLREVNKRVQDIHPTVPNPYNLLSSLPPSHTWYSVLDLKDAFFCLKLHPNSQPLFAFEWRDPEKGNTGQLTWTRLPQGFKNSPTLFNEALHRDLASFRALNPQVVMLQYVDDLLVAAPTYRDCKEGTRRLLQELSKLGYRVSAKKAQLCREEVTYLGYLLKGGKRWLTPARKATVMKIPTPTTPRQVREFLGTAGFCRLWIPGFASLAAPLYPLTRPKVPFTWTEAHQEAFGRIKEALLSAPALALPDLTKPFALYVDEKEGVARGVLTQTLGPWRRPVAYLSKKLDPVASGWPTCLKAIAAVALLLKDADKLTLGQNVLVIAPHNLESIVRQPPDRWMTNARMTHYQSLLLNERVSFAPPAILNPATLLPVESDDTPIHICSEILAEETGTRPDLRDQPLPGVPAWYTDGSSFIMDGRRQAGAAIVDNKRTVWASNLPEGTSAQKAELIALTQALRLAEGKSINIYTDSRYAFATAHVHGAIYKQRGWLTSAGKDIKNKEEILALLEAIHLPKRVAIIHCPGHQRGTDPVATGNRKADEAAKQAAQSTRILTETTKNAGKRTADGSEFEKRTADGSEFESPKKKAKVE

SEQ ID NO: 7073 - protein, 2218 aa, synthetic construct
MPAAKRVKLDGGDKKYSIGLDIGTNSVGWAVITDEYKVPSKKFKVLGNTDRHSIKKNLIGALLFDSGETAEATRLKRTARRRYTRRKNRICYLQEIFSNEMAKVDDSFFHRLEESFLVEEDKKHERHPIFGNIVDEVAYHEKYPTIYHLRKKLVDSTDKADLRLIYLALAHMIKFRGHFLIEGDLNPDNSDVDKLFIQLVQTYNQLFEENPINASGVDAKAILSARLSKSRRLENLIAQLPGEKKNGLFGNLIALSLGLTPNFKSNFDLAEDAKLQLSKDTYDDDLDNLLAQIGDQYADLFLAAKNLSDAILLSDILRVNTEITKAPLSASMIKRYDEHHQDLTLLKALVRQQLPEKYKEIFFDQSKNGYAGYIDGGASQEEFYKFIKPILEKMDGTEELLVKLNREDLLRKQRTFDNGSIPHQIHLGELHAILRRQEDFYPFLKDNREKIEKILTFRIPYYVGPLARGNSRFAWMTRKSEETITPWNFEEVVDKGASAQSFIERMTNFDKNLPNEKVLPKHSLLYEYFTVYNELTKVKYVTEGMRKPAFLSGEQKKAIVDLLFKTNRKVTVKQLKEDYFKKIECFDSVEISGVEDRFNASLGTYHDLLKIIKDKDFLDNEENEDILEDIVLTLTLFEDREMIEERLKTYAHLFDDKVMKQLKRRRYTGWGRLSRKLINGIRDKQSGKTILDFLKSDGFANRNFMQLIHDDSLTFKEDIQKAQVSGQGDSLHEHIANLAGSPAIKKGILQTVKVVDELVKVMGRHKPENIVIEMARENQTTQKGQKNSRERMKRIEEGIKELGSQILKEHPVENTQLQNEKLYLYYLQNGRDMYVDQELDINRLSDYDVDHIVPQSFLKDDSIDNKVLTRSDKARGKSDNVPSEEVVKKMKNYWRQLLNAKLITQRKFDNLTKAERGGLSELDKAGFIKRQLVETRQITKHVAQILDSRMNTKYDENDKLIREVKVITLKSKLVSDFRKDFQFYKVREINNYHHAHDAYLNAVVGTALIKKYPKLESEFVYGDYKVYDVRKMIAKSEQEIGKATAKYFFYSNIMNFFKTEITLANGEIRKRPLIETNGETGEIVWDKGRDFATVRKVLSMPQVNIVKKTEVQTGGFSKESILPKRNSDKLIARKKDWDPKKYGGFDSPTVAYSVLVVAKVEKGKSKKLKSVKELLGITIMERSSFEKNPIDFLEAKGYKEVKKDLIIKLPKYSLFELENGRKRMLASAGELQKGNELALPSKYVNFLYLASHYEKLKGSPEDNEQKQLFVEQHKHYLDEIIEQISEFSKRVILADANLDKVLSAYNKHRDKPIREQAENIIHLFTLTNLGAPAAFKYFDTTIDRKRYTSTKEVLDATLIHQSITGLYETRIDLSQLGGDGGGSSGGSEAAAKGGTLGDQGSRGSDPLPEPRVTLTVEGIPTEFLVNTGAEHSVLTKPMGKMGSKRTVVAGATGSKVYPWTTKRLLKIGQKQVTHSFLVIPECPAPLLGRDLLTKLKAQIQFSTEGPQVTWEDRPAMCLVLNLEEEYRLHEKPVPPSIDPSWLQLFPMVWAEKAGMGLANQVPPVVVELKSDASPVAVRQYPMSKEAREGIRPHIQRFLDLGILVPCQSPWNTPLLPVKKPGTNDYRPVQDLREVNKRVQDIHPTVPNPYNLLSSLPPSHTWYSVLDLKDAFFCLKLHPNSQPLFAFEWRDPEKGNTGQLTWTRLPQGFKNSPTLFNEALHRDLASFRALNPQVVMLQYVDDLLVAAPTYRDCKEGTRRLLQELSKLGYRVSAKKAQLCREEVTYLGYLLKGGKRWLTPARKATVMKIPTPTTPRQVREFLGTAGFCRLWIPGFASLAAPLYPLTRPKVPFTWTEAHQEAFGRIKEALLSAPALALPDLTKPFALYVDEKEGVARGVLTQTLGPWRRPVAYLSKKLDPVASGWPTCLKAIAAVALLLKDADKLTLGQNVLVIAPHNLESIVRQPPDRWMTNARMTHYQSLLLNERVSFAPPAILNPATLLPVESDDTPIHICSEILAEETGTRPDLRDQPLPGVPAWYTDGSSFIMDGRRQAGAAIVDNKRTVWASNLPEGTSAQKAELIALTQALRLAEGKSINIYTDSRYAFATAHVHGAIYKQRGWLTSAGKDIKNKEEILALLEAIHLPKRVAIIHCPGHQRGTDPVATGNRKADEAAKQAAQSTRILTETTKNAGKRTADGSEFEKRTADGSEFESPKKKAKVE

SEQ ID NO: 7074 - protein, 2090 aa, synthetic construct
MPAAKRVKLDGGDKKYSIGLDIGTNSVGWAVITDEYKVPSKKFKVLGNTDRHSIKKNLIGALLFDSGETAEATRLKRTARRRYTRRKNRICYLQEIFSNEMAKVDDSFFHRLEESFLVEEDKKHERHPIFGNIVDEVAYHEKYPTIYHLRKKLVDSTDKADLRLIYLALAHMIKFRGHFLIEGDLNPDNSDVDKLFIQLVQTYNQLFEENPINASGVDAKAILSARLSKSRRLENLIAQLPGEKKNGLFGNLIALSLGLTPNFKSNFDLAEDAKLQLSKDTYDDDLDNLLAQIGDQYADLFLAAKNLSDAILLSDILRVNTEITKAPLSASMIKRYDEHHQDLTLLKALVRQQLPEKYKEIFFDQSKNGYAGYIDGGASQEEFYKFIKPILEKMDGTEELLVKLNREDLLRKQRTFDNGSIPHQIHLGELHAILRRQEDFYPFLKDNREKIEKILTFRIPYYVGPLARGNSRFAWMTRKSEETITPWNFEEVVDKGASAQSFIERMTNFDKNLPNEKVLPKHSLLYEYFTVYNELTKVKYVTEGMRKPAFLSGEQKKAIVDLLFKTNRKVTVKQLKEDYFKKIECFDSVEISGVEDRFNASLGTYHDLLKIIKDKDFLDNEENEDILEDIVLTLTLFEDREMIEERLKTYAHLFDDKVMKQLKRRRYTGWGRLSRKLINGIRDKQSGKTILDFLKSDGFANRNFMQLIHDDSLTFKEDIQKAQVSGQGDSLHEHIANLAGSPAIKKGILQTVKVVDELVKVMGRHKPENIVIEMARENQTTQKGQKNSRERMKRIEEGIKELGSQILKEHPVENTQLQNEKLYLYYLQNGRDMYVDQELDINRLSDYDVDHIVPQSFLKDDSIDNKVLTRSDKARGKSDNVPSEEVVKKMKNYWRQLLNAKLITQRKFDNLTKAERGGLSELDKAGFIKRQLVETRQITKHVAQILDSRMNTKYDENDKLIREVKVITLKSKLVSDFRKDFQFYKVREINNYHHAHDAYLNAVVGTALIKKYPKLESEFVYGDYKVYDVRKMIAKSEQEIGKATAKYFFYSNIMNFFKTEITLANGEIRKRPLIETNGETGEIVWDKGRDFATVRKVLSMPQVNIVKKTEVQTGGFSKESILPKRNSDKLIARKKDWDPKKYGGFDSPTVAYSVLVVAKVEKGKSKKLKSVKELLGITIMERSSFEKNPIDFLEAKGYKEVKKDLIIKLPKYSLFELENGRKRMLASAGELQKGNELALPSKYVNFLYLASHYEKLKGSPEDNEQKQLFVEQHKHYLDEIIEQISEFSKRVILADANLDKVLSAYNKHRDKPIREQAENIIHLFTLTNLGAPAAFKYFDTTIDRKRYTSTKEVLDATLIHQSITGLYETRIDLSQLGGDGGGSSGGSEAAAKGGTLQLDDEYRLYSPLVKPDQNIQFWLEQFPQAWAETAGMGLAKQVPPQVIQLKASATPVSVRQYPLSKEAQEGIRPHVQRLIQQGILVPVQSPWNTPLLPVRKPGTNDYRPVQDLREVNKRVQDIHPTVPNPYNLLCALPPQRSWYTVLDLKDAFFCLRLHPTSQPLFAFEWRDPGTGRTGQLTWTRLPQGFKNSPTIFDEALHRDLANFRIQHPQVTLLQYVDDLLLAGATKQDCLEGTKALLLELSDLGYRASAKKAQICRREVTYLGYSLRDGQRWLTEARKKTVVQIPAPTTAKQVREFLGTAGFCRLWIPGFATLAAPLYPLTKEKGEFSWAPEHQKAFDAIKKALLSAPALALPDVTKPFTLYVDERKGVARGVLTQTLGPWRRPVAYLSKKLDPVASGWPVCLKAIAAVAILVKDADKLTLGQNITVIAPHALENIVRQPPDRWMTNARMTHYQSLLLTERVTFAPPAALNPATLLPEETDEPVTHDCHQLLIEETGVRKDLTDIPLTGEVLTWFTDGSSYVVEGKRMAGAAVVDGTRTIWASSLPEGTSAQKAELMALTQALRLAEGKSINIYTDSRYAFATAHVHGAIYKQRGLLTSAGREIKNKEEILSLLEALHLPKRLAIIHCPGHQKAKDPISRGNQMADRVAKQAAQGVNLLAGKRTADGSEFEKRTADGSEFESPKKKAKVE

SEQ ID NO: 7075 - protein, 2090 aa, synthetic construct; identical to SEQ ID NO: 7074

SEQ ID NO: 7076 - protein, 2176 aa, synthetic construct
MPAAKRVKLDGGDKKYSIGLDIGTNSVGWAVITDEYKVPSKKFKVLGNTDRHSIKKNLIGALLFDSGETAEATRLKRTARRRYTRRKNRICYLQEIFSNEMAKVDDSFFHRLEESFLVEEDKKHERHPIFGNIVDEVAYHEKYPTIYHLRKKLVDSTDKADLRLIYLALAHMIKFRGHFLIEGDLNPDNSDVDKLFIQLVQTYNQLFEENPINASGVDAKAILSARLSKSRRLENLIAQLPGEKKNGLFGNLIALSLGLTPNFKSNFDLAEDAKLQLSKDTYDDDLDNLLAQIGDQYADLFLAAKNLSDAILLSDILRVNTEITKAPLSASMIKRYDEHHQDLTLLKALVRQQLPEKYKEIFFDQSKNGYAGYIDGGASQEEFYKFIKPILEKMDGTEELLVKLNREDLLRKQRTFDNGSIPHQIHLGELHAILRRQEDFYPFLKDNREKIEKILTFRIPYYVGPLARGNSRFAWMTRKSEETITPWNFEEVVDKGASAQSFIERMTNFDKNLPNEKVLPKHSLLYEYFTVYNELTKVKYVTEGMRKPAFLSGEQKKAIVDLLFKTNRKVTVKQLKEDYFKKIECFDSVEISGVEDRFNASLGTYHDLLKIIKDKDFLDNEENEDILEDIVLTLTLFEDREMIEERLKTYAHLFDDKVMKQLKRRRYTGWGRLSRKLINGIRDKQSGKTILDFLKSDGFANRNFMQLIHDDSLTFKEDIQKAQVSGQGDSLHEHIANLAGSPAIKKGILQTVKVVDELVKVMGRHKPENIVIEMARENQTTQKGQKNSRERMKRIEEGIKELGSQILKEHPVENTQLQNEKLYLYYLQNGRDMYVDQELDINRLSDYDVDHIVPQSFLKDDSIDNKVLTRSDKARGKSDNVPSEEVVKKMKNYWRQLLNAKLITQRKFDNLTKAERGGLSELDKAGFIKRQLVETRQITKHVAQILDSRMNTKYDENDKLIREVKVITLKSKLVSDFRKDFQFYKVREINNYHHAHDAYLNAVVGTALIKKYPKLESEFVYGDYKVYDVRKMIAKSEQEIGKATAKYFFYSNIMNFFKTEITLANGEIRKRPLIETNGETGEIVWDKGRDFATVRKVLSMPQVNIVKKTEVQTGGFSKESILPKRNSDKLIARKKDWDPKKYGGFDSPTVAYSVLVVAKVEKGKSKKLKSVKELLGITIMERSSFEKNPIDFLEAKGYKEVKKDLIIKLPKYSLFELENGRKRMLASAGELQKGNELALPSKYVNFLYLASHYEKLKGSPEDNEQKQLFVEQHKHYLDEIIEQISEFSKRVILADANLDKVLSAYNKHRDKPIREQAENIIHLFTLTNLGAPAAFKYFDTTIDRKRYTSTKEVLDATLIHQSITGLYETRIDLSQLGGDGGGSSGGSEAAAKGGMDPLQLLQPLEAEIKGTKLKAHWNSGATITCVPEAFLEDERPIQTMLIKTIHGEKQQDVYYLTFKVQGRKVEAEVLASPYDYILLNPSDVPWLMKKPLQLTVLVPLHEYQERLLQQTALPKEQKELLQKLFLKYDALWQHWENQVGHRRIKPHNIATGTLAPRPQKQYPINPKAKPSIQIVIDDLLKQGVLIQQNSTMNTPVYPVPKPDGKWRMVLDYREVNKTIPLIAAQNQHSAGILSSIYRGKYKTTLDLTNGFWAHPITPESYWLTAFTWQGKQYCWTRLPQGFLNSPALFNADVVDLLKEIPNVQAYVDDIYISHDDPQEHLEQLEKIFSILLNAGYVVSLKKSEIAQREVEFLGFNITKEGRGLTDTFKQKLLNITPPKDLKQLQSILGLLNFARNFIPNYSELVKPLYTIVAPANGKFISWTEDNSNQLQHIISVLNQADNLEERNPETRLIIKVNSSPSAGYIRYYNEGSKRPIMYVNYIFSKAEAKFTQTEKLLTTMHKGLIKAMDLAMGQEILVYSPIVSMTKIQRTPLPERKALPVRWITWMTYLEDPRIQFHYDKSLPELQQIPNVTEDVIAKTKHPSEFAMVFYTDGSAIKHPDVNKSHSAGMGIAQVQFIPEYKIVHQWSIPLGDHTAQLAEIAAVEFACKKALKISGPVLIVTDSFYVAESANKELPYWKSNGFLNNKKKPLRHVSKWKSIAECLQLKPDIIIMHEKGHQQPMTTLHTEGNNLADKLATQGSYVVHAGKRTADGSEFEKRTADGSEFESPKKKAKVE

SEQ ID NO: 7077 - protein, 2176 aa, synthetic construct
MPAAKRVKLDGGDKKYSIGLDIGTNSVGWAVITDEYKVPSKKFKVLGNTDRHSIKKNLIGALLFDSGETAEATRLKRTARRRYTRRKNRICYLQEIFSNEMAKVDDSFFHRLEESFLVEEDKKHERHPIFGNIVDEVAYHEKYPTIYHLRKKLVDSTDKADLRLIYLALAHMIKFRGHFLIEGDLNPDNSDVDKLFIQLVQTYNQLFEENPINASGVDAKAILSARLSKSRRLENLIAQLPGEKKNGLFGNLIALSLGLTPNFKSNFDLAEDAKLQLSKDTYDDDLDNLLAQIGDQYADLFLAAKNLSDAILLSDILRVNTEITKAPLSASMIKRYDEHHQDLTLLKALVRQQLPEKYKEIFFDQSKNGYAGYIDGGASQEEFYKFIKPILEKMDGTEELLVKLNREDLLRKQRTFDNGSIPHQIHLGELHAILRRQEDFYPFLKDNREKIEKILTFRIPYYVGPLARGNSRFAWMTRKSEETITPWNFEEVVDKGASAQSFIERMTNFDKNLPNEKVLPKHSLLYEYFTVYNELTKVKYVTEGMRKPAFLSGEQKKAIVDLLFKTNRKVTVKQLKEDYFKKIECFDSVEISGVEDRFNASLGTYHDLLKIIKDKDFLDNEENEDILEDIVLTLTLFEDREMIEERLKTYAHLFDDKVMKQLKRRRYTGWGRLSRKLINGIRDKQSGKTILDFLKSDGFANRNFMQLIHDDSLTFKEDIQKAQVSGQGDSLHEHIANLAGSPAIKKGILQTVKVVDELVKVMGRHKPENIVIEMARENQTTQKGQKNSRERMKRIEEGIKELGSQILKEHPVENTQLQNEKLYLYYLQNGRDMYVDQELDINRLSDYDVDHIVPQSFLKDDSIDNKVLTRSDKARGKSDNVPSEEVVKKMKNYWRQLLNAKLITQRKFDNLTKAERGGLSELDKAGFIKRQLVETRQITKHVAQILDSRMNTKYDENDKLIREVKVITLKSKLVSDFRKDFQFYKVREINNYHHAHDAYLNAVVGTALIKKYPKLESEFVYGDYKVYDVRKMIAKSEQEIGKATAKYFFYSNIMNFFKTEITLANGEIRKRPLIETNGETGEIVWDKGRDFATVRKVLSMPQVNIVKKTEVQTGGFSKESILPKRNSDKLIARKKDWDPKKYGGFDSPTVAYSVLVVAKVEKGKSKKLKSVKELLGITIMERSSFEKNPIDFLEAKGYKEVKKDLIIKLPKYSLFELENGRKRMLASAGELQKGNELALPSKYVNFLYLASHYEKLKGSPEDNEQKQLFVEQHKHYLDEIIEQISEFSKRVILADANLDKVLSAYNKHRDKPIREQAENIIHLFTLTNLGAPAAFKYFDTTIDRKRYTSTKEVLDATLIHQSITGLYETRIDLSQLGGDGGGSSGGSEAAAKGGMDPLQLLQPLEAEIKGTKLKAHWNSGATITCVPQAFLEEEVPIKNIWIKTIHGEKEQPVYYLTFKIQGRKVEAEVISSPYDYILVSPSDIPWLMKKPLQLTTLVPLQEYEERLLKQTMLTGSYKEKLQSLFLKYDALWQHWENQVGHRRIKPHHIATGTVNPRPQKQYPINPKAKASIQTVINDLLKQGVLIQQNSIMNTPVYPVPKPDGKWRMVLDYREVNKTIPLIAAQNQHSAGILSSIFRGKYKTTLDLSNGFWAHSITPESYWLTAFTWLGQQYCWTRLPQGFLNSPALFNADVVDLLKEVPNVQVYVDDIYISHDDPREHLEQLEKVFSLLLNAGYVVSLKKSEIAQHEVEFLGFNITKEGRGLTETFKQKLLNITPPRDLKQLQSILGLLNFARNFIPNFSELVKPLYNIIATAPGKYITWTTDNSQQLQNIISMLNSAENLEERNPEVRLIMKVNTSPSAGYIRFYNEFAKRPIMYLNYVYTKAEVKFTNTEKLLTTIHKGLIKALDLGMGQEILVYSPIVSMTKIQKTPLPERKALPIRWITWMSYLEDPRIQFHYDKTLPELQQVPTVTDDIIAKIKHPSEFSMVFYTDGSAIKHPNVNKSHNAGMGIAQVQFKPEFTVINTWSIPLGDHTAQLAEVAAVEFACKKALKIDGPVLIVTDSFYVAESVNKELPYWQSNGFFNNKKKPLKHVSKWKSIADCIQLKPDIIIIHEKGHQPTASTFHTEGNNLADKLATQGSYVVNAGKRTADGSEFEKRTADGSEFESPKKKAKVE

SEQ ID NO: 7078 - protein, 2098 aa, synthetic construct
MPAAKRVKLDGGDKKYSIGLDIGTNSVGWAVITDEYKVPSKKFKVLGNTDRHSIKKNLIGALLFDSGETAEATRLKRTARRRYTRRKNRICYLQEIFSNEMAKVDDSFFHRLEESFLVEEDKKHERHPIFGNIVDEVAYHEKYPTIYHLRKKLVDSTDKADLRLIYLALAHMIKFRGHFLIEGDLNPDNSDVDKLFIQLVQTYNQLFEENPINASGVDAKAILSARLSKSRRLENLIAQLPGEKKNGLFGNLIALSLGLTPNFKSNFDLAEDAKLQLSKDTYDDDLDNLLAQIGDQYADLFLAAKNLSDAILLSDILRVNTEITKAPLSASMIKRYDEHHQDLTLLKALVRQQLPEKYKEIFFDQSKNGYAGYIDGGASQEEFYKFIKPILEKMDGTEELLVKLNREDLLRKQRTFDNGSIPHQIHLGELHAILRRQEDFYPFLKDNREKIEKILTFRIPYYVGPLARGNSRFAWMTRKSEETITPWNFEEVVDKGASAQSFIERMTNFDKNLPNEKVLPKHSLLYEYFTVYNELTKVKYVTEGMRKPAFLSGEQKKAIVDLLFKTNRKVTVKQLKEDYFKKIECFDSVEISGVEDRFNASLGTYHDLLKIIKDKDFLDNEENEDILEDIVLTLTLFEDREMIEERLKTYAHLFDDKVMKQLKRRRYTGWGRLSRKLINGIRDKQSGKTILDFLKSDGFANRNFMQLIHDDSLTFKEDIQKAQVSGQGDSLHEHIANLAGSPAIKKGILQTVKVVDELVKVMGRHKPENIVIEMARENQTTQKGQKNSRERMKRIEEGIKELGSQILKEHPVENTQLQNEKLYLYYLQNGRDMYVDQELDINRLSDYDVDHIVPQSFLKDDSIDNKVLTRSDKARGKSDNVPSEEVVKKMKNYWRQLLNAKLITQRKFDNLTKAERGGLSELDKAGFIKRQLVETRQITKHVAQILDSRMNTKYDENDKLIREVKVITLKSKLVSDFRKDFQFYKVREINNYHHAHDAYLNAVVGTALIKKYPKLESEFVYGDYKVYDVRKMIAKSEQEIGKATAKYFFYSNIMNFFKTEITLANGEIRKRPLIETNGETGEIVWDKGRDFATVRKVLSMPQVNIVKKTEVQTGGFSKESILPKRNSDKLIARKKDWDPKKYGGFDSPTVAYSVLVVAKVEKGKSKKLKSVKELLGITIMERSSFEKNPIDFLEAKGYKEVKKDLIIKLPKYSLFELENGRKRMLASAGELQKGNELALPSKYVNFLYLASHYEKLKGSPEDNEQKQLFVEQHKHYLDEIIEQISEFSKRVILADANLDKVLSAYNKHRDKPIREQAENIIHLFTLTNLGAPAAFKYFDTTIDRKRYTSTKEVLDATLIHQSITGLYETRIDLSQLGGDGGGSSEAAAKGGSGGTAPLEEEYRLFLEAPIQNVTLLEQWKREIPKVWAEINPPGLASTQAPIHVQLLSTALPVRVRQYPITLEAKRSLRETIRKFRAAGILRPVHSPWNTPLLPVRKSGTSEYRMVQDLREVNKRVETIHPTVPNPYTLLSLLPPDRIWYSVLDLKDAFFCIPLAPESQLIFAFEWADAEEGESGQLTWTRLPQGFKNSPTLFDEALNRDLQGFRLDHPSVSLLQYVDDLLIAADTQAACLSATRDLLMTLAELGYRVSGKKAQLCQEEVTYLGFKIHKGSRSLSNSRTQAILQIPVPKTKRQVREFLGTIGYCRLWIPGFAELAQPLYAATRGGNDPLVWGEKEEEAFQSLKLALTQPPALALPSLDKPFQLFVEETSGAAKGVLTQALGPWKRPVAYLSKRLDPVAAGWPRCLRAIAAAALLTREASKLTFGQDIEITSSHNLESLLRSPPDKWLTNARITQYQVLLLDPPRVRFKQTAALNPATLLPETDDTLPIHHCLDTLDSLTSTRPDLTDQPLAQAEATLFTDGSSYIRDGKRYAGAAVVTLDSVIWAEPLPIGTSAQKAELIALTKALEWSKDKSVNIYTDSRYAFATLHVHGMIYRERGLLTAGGKAIKNAPEILALLTAVWLPKRVAVMHCKGHQKDDAPTSTGNRRADEVAREVAIRPLSTQATISAGKRTADGSEFEKRTADGSEFESPKKKAKVE

SEQ ID NO: 7079 - protein, 2098 aa, synthetic construct
MPAAKRVKLDGGDKKYSIGLDIGTNSVGWAVITDEYKVPSKKFKVLGNTDRHSIKKNLIGALLFDSGETAEATRLKRTARRRYTRRKNRICYLQEIFSNEMAKVDDSFFHRLEESFLVEEDKKHERHPIFGNIVDEVAYHEKYPTIYHLRKKLVDSTDKADLRLIYLALAHMIKFRGHFLIEGDLNPDNSDVDKLFIQLVQTYNQLFEENPINASGVDAKAILSARLSKSRRLENLIAQLPGEKKNGLFGNLIALSLGLTPNFKSNFDLAEDAKLQLSKDTYDDDLDNLLAQIGDQYADLFLAAKNLSDAILLSDILRVNTEITKAPLSASMIKRYDEHHQDLTLLKALVRQQLPEKYKEIFFDQSKNGYAGYIDGGASQEEFYKFIKPILEKMDGTEELLVKLNREDLLRKQRTFDNGSIPHQIHLGELHAILRRQEDFYPFLKDNREKIEKILTFRIPYYVGPLARGNSRFAWMTRKSEETITPWNFEEVVDKGASAQSFIERMTNFDKNLPNEKVLPKHSLLYEYFTVYNELTKVKYVTEGMRKPAFLSGEQKKAIVDLLFKTNRKVTVKQLKEDYFKKIECFDSVEISGVEDRFNASLGTYHDLLKIIKDKDFLDNEENEDILEDIVLTLTLFEDREMIEERLKTYAHLFDDKVMKQLKRRRYTGWGRLSRKLINGIRDKQSGKTILDFLKSDGFANRNFMQLIHDDSLTFKEDIQKAQVSGQGDSLHEHIANLAGSPAIKKGILQTVKVVDELVKVMGRHKPENIVIEMARENQTTQKGQKNSRERMKRIEEGIKELGSQILKEHPVENTQLQNEKLYLYYLQNGRDMYVDQELDINRLSDYDVDHIVPQSFLKDDSIDNKVLTRSDKARGKSDNVPSEEVVKKMKNYWRQLLNAKLITQRKFDNLTKAERGGLSELDKAGFIKRQLVETRQITKHVAQILDSRMNTKYDENDKLIREVKVITLKSKLVSDFRKDFQFYKVREINNYHHAHDAYLNAVVGTALIKKYPKLESEFVYGDYKVYDVRKMIAKSEQEIGKATAKYFFYSNIMNFFKTEITLANGEIRKRPLIETNGETGEIVWDKGRDFATVRKVLSMPQVNIVKKTEVQTGGFSKESILPKRNSDKLIARKKDWDPKKYGGFDSPTVAYSVLVVAKVEKGKSKKLKSVKELLGITIMERSSFEKNPIDFLEAKGYKEVKKDLIIKLPKYSLFELENGRKRMLASAGELQKGNELALPSKYVNFLYLASHYEKLKGSPEDNEQKQLFVEQHKHYLDEIIEQISEFSKRVILADANLDKVLSAYNKHRDKPIREQAENIIHLFTLTNLGAPAAFKYFDTTIDRKRYTSTKEVLDATLIHQSITGLYETRIDLSQLGGDGGGSSEAAAKGGSGGTAPLEEEYRLFLEAPIQNVTLLEQWKREIPKVWAEINPPGLASTQAPIHVQLLSTALPVRVRQYPITLEAKRSLRETIRKFRAAGILRPVHSPWNTPLLPVRKSGTSEYRMVQDLREVNKRVETIHPTVPNPYTLLSLLPPDRIWYSVLDLKDAFFCIPLAPESQLIFAFEWADAEEGESGQLTWTRLPQGFKNSPTLFNEALNRDLQGFRLDHPSVSLLQYVDDLLIAADTQAACLSATRDLLMTLAELGYRVSGKKAQLCQEEVTYLGFKIHKGSRSLSNSRTQAILQIPVPKTKRQVREFLGTIGYCRLWIPGFAELAQPLYAATRPGNDPLVWGEKEEEAFQSLKLALTQPPALALPSLDKPFQLFVEETSGAAKGVLTQALGPWKRPVAYLSKRLDPVAAGWPRCLRAIAAAALLTREASKLTFGQDIEITSSHNLESLLRSPPDKWLTNARITQYQVLLLDPPRVRFKQTAALNPATLLPETDDTLPIHHCLDTLDSLTSTRPDLTDQPLAQAEATLFTDGSSYIRDGKRYAGAAVVTLDSVIWAEPLPIGTSAQKAELIALTKALEWSKDKSVNIYTDSRYAFATLHVHGMIYRERGWLTAGGKAIKNAPEILALLTAVWLPKRVAVMHCKGHQKDDAPTSTGNRRADEVAREVAIRPLSTQATISAGKRTADGSEFEKRTADGSEFESPKKKAKVE

SEQ ID NO: 7080 - protein, 2098 aa, synthetic construct
MPAAKRVKLDGGDKKYSIGLDIGTNSVGWAVITDEYKVPSKKFKVLGNTDRHSIKKNLIGALLFDSGETAEATRLKRTARRRYTRRKNRICYLQEIFSNEMAKVDDSFFHRLEESFLVEEDKKHERHPIFGNIVDEVAYHEKYPTIYHLRKKLVDSTDKADLRLIYLALAHMIKFRGHFLIEGDLNPDNSDVDKLFIQLVQTYNQLFEENPINASGVDAKAILSARLSKSRRLENLIAQLPGEKKNGLFGNLIALSLGLTPNFKSNFDLAEDAKLQLSKDTYDDDLDNLLAQIGDQYADLFLAAKNLSDAILLSDILRVNTEITKAPLSASMIKRYDEHHQDLTLLKALVRQQLPEKYKEIFFDQSKNGYAGYIDGGASQEEFYKFIKPILEKMDGTEELLVKLNREDLLRKQRTFDNGSIPHQIHLGELHAILRRQEDFYPFLKDNREKIEKILTFRIPYYVGPLARGNSRFAWMTRKSEETITPWNFEEVVDKGASAQSFIERMTNFDKNLPNEKVLPKHSLLYEYFTVYNELTKVKYVTEGMRKPAFLSGEQKKAIVDLLFKTNRKVTVKQLKEDYFKKIECFDSVEISGVEDRFNASLGTYHDLLKIIKDKDFLDNEENEDILEDIVLTLTLFEDREMIEERLKTYAHLFDDKVMKQLKRRRYTGWGRLSRKLINGIRDKQSGKTILDFLKSDGFANRNFMQLIHDDSLTFKEDIQKAQVSGQGDSLHEHIANLAGSPAIKKGILQTVKVVDELVKVMGRHKPENIVIEMARENQTTQKGQKNSRERMKRIEEGIKELGSQILKEHPVENTQLQNEKLYLYYLQNGRDMYVDQELDINRLSDYDVDHIVPQSFLKDDSIDNKVLTRSDKARGKSDNVPSEEVVKKMKNYWRQLLNAKLITQRKFDNLTKAERGGLSELDKAGFIKRQLVETRQITKHVAQILDSRMNTKYDENDKLIREVKVITLKSKLVSDFRKDFQFYKVREINNYHHAHDAYLNAVVGTALIKKYPKLESEFVYGDYKVYDVRKMIAKSEQEIGKATAKYFFYSNIMNFFKTEITLANGEIRKRPLIETNGETGEIVWDKGRDFATVRKVLSMPQVNIVKKTEVQTGGFSKESILPKRNSDKLIARKKDWDPKKYGGFDSPTVAYSVLVVAKVEKGKSKKLKSVKELLGITIMERSSFEKNPIDFLEAKGYKEVKKDLIIKLPKYSLFELENGRKRMLASAGELQKGNELALPSKYVNFLYLASHYEKLKGSPEDNEQKQLFVEQHKHYLDEIIEQISEFSKRVILADANLDKVLSAYNKHRDKPIREQAENIIHLFTLTNLGAPAAFKYFDTTIDRKRYTSTKEVLDATLIHQSITGLYETRIDLSQLGGDGGGSSEAAAKGGSGGTAPLEEEYRLFLEAPIQNVTLLEQWKREIPKVWAEINPPGLASTQAPIHVQLLSTALPVRVRQYPITLEAKRSLRETIRKFRAAGILRPVHSPWNTPLLPVRKSGTSEYRMVQDLREVNKRVETIHPTVPNPYTLLSLLPPDRIWYSVLDLKDAFFCIPLAPESQLIFAFEWADAEEGESGQLTWTRLPQGFKNSPTLFNEALNRDLQGFRLDHPSVSLLQYVDDLLIAADTQAACLSATRDLLMTLAELGYRVSGKKAQLCQEEVTYLGFKIHKGSRSLSNSRTQAILQIPVPKTKRQVREFLGKIGYCRLFIPGFAELAQPLYAATRPGNDPLVWGEKEEEAFQSLKLALTQPPALALPSLDKPFQLFVEETSGAAKGVLTQALGPWKRPVAYLSKRLDPVAAGWPRCLRAIAAAALLTREASKLTFGQDIEITSSHNLESLLRSPPDKWLTNARITQYQVLLLDPPRVRFKQTAALNPATLLPETDDTLPIHHCLDTLDSLTSTRPDLTDQPLAQAEATLFTDGSSYIRDGKRYAGAAVVTLDSVIWAEPLPIGTSAQKAELIALTKALEWSKDKSVNIYTDSRYAFATLHVHGMIYRERGWLTAGGKAIKNAPEILALLTAVWLPKRVAVMHCKGHQKDDAPTSTGNRRADEVAREVAIRPLSTQATISAGKRTADGSEFEKRTADGSEFESPKKKAKVE

SEQ ID NO: 7081 - protein, 2102 aa, synthetic construct
MPAAKRVKLDGGDKKYSIGLDIGTNSVGWAVITDEYKVPSKKFKVLGNTDRHSIKKNLIGALLFDSGETAEATRLKRTARRRYTRRKNRICYLQEIFSNEMAKVDDSFFHRLEESFLVEEDKKHERHPIFGNIVDEVAYHEKYPTIYHLRKKLVDSTDKADLRLIYLALAHMIKFRGHFLIEGDLNPDNSDVDKLFIQLVQTYNQLFEENPINASGVDAKAILSARLSKSRRLENLIAQLPGEKKNGLFGNLIALSLGLTPNFKSNFDLAEDAKLQLSKDTYDDDLDNLLAQIGDQYADLFLAAKNLSDAILLSDILRVNTEITKAPLSASMIKRYDEHHQDLTLLKALVRQQLPEKYKEIFFDQSKNGYAGYIDGGASQEEFYKFIKPILEKMDGTEELLVKLNREDLLRKQRTFDNGSIPHQIHLGELHAILRRQEDFYPFLKDNREKIEKILTFRIPYYVGPLARGNSRFAWMTRKSEETITPWNFEEVVDKGASAQSFIERMTNFDKNLPNEKVLPKHSLLYEYFTVYNELTKVKYVTEGMRKPAFLSGEQKKAIVDLLFKTNRKVTVKQLKEDYFKKIECFDSVEISGVEDRFNASLGTYHDLLKIIKDKDFLDNEENEDILEDIVLTLTLFEDREMIEERLKTYAHLFDDKVMKQLKRRRYTGWGRLSRKLINGIRDKQSGKTILDFLKSDGFANRNFMQLIHDDSLTFKEDIQKAQVSGQGDSLHEHIANLAGSPAIKKGILQTVKVVDELVKVMGRHKPENIVIEMARENQTTQKGQKNSRERMKRIEEGIKELGSQILKEHPVENTQLQNEKLYLYYLQNGRDMYVDQELDINRLSDYDVDHIVPQSFLKDDSIDNKVLTRSDKARGKSDNVPSEEVVKKMKNYWRQLLNAKLITQRKFDNLTKAERGGLSELDKAGFIKRQLVETRQITKHVAQILDSRMNTKYDENDKLIREVKVITLKSKLVSDFRKDFQFYKVREINNYHHAHDAYLNAVVGTALIKKYPKLESEFVYGDYKVYDVRKMIAKSEQEIGKATAKYFFYSNIMNFFKTEITLANGEIRKRPLIETNGETGEIVWDKGRDFATVRKVLSMPQVNIVKKTEVQTGGFSKESILPKRNSDKLIARKKDWDPKKYGGFDSPTVAYSVLVVAKVEKGKSKKLKSVKELLGITIMERSSFEKNPIDFLEAKGYKEVKKDLIIKLPKYSLFELENGRKRMLASAGELQKGNELALPSKYVNFLYLASHYEKLKGSPEDNEQKQLFVEQHKHYLDEIIEQISEFSKRVILADANLDKVLSAYNKHRDKPIREQAENIIHLFTLTNLGAPAAFKYFDTTIDRKRYTSTKEVLDATLIHQSITGLYETRIDLSQLGGDGGGSSEAAAKGGSGGTVSLQDEHRLFDIPVTTSLPDVWLQDFPQAWAETGGLGRAKCQAPIIIDLKPTAVPVSIKQYPMSLEAHMGIRQHIIKFLELGVLRPCRSPWNTPLLPVKKPGTQDYRPVQDLREINKRTVDIHPTVPNPYNLLSTLKPDYSWYTVLDLKDAFFCLPLAPQSQELFAFEWKDPERGISGQLTWTRLPQGFKNSPTLFNEALHRDLTDFRTQHPEVTLLQYVDDLLLAAPTKKACTQGTRHLLQELGEKGYRASAKKAQICQTKVTYLGYILSEGKRWLTPGRIETVARIPPPRNPREVREFLGTAGFCRLWIPGFAELAAPLYALTKPSTPFTWQTEHQLAFEALKKALLSAPALGLPDTSKPFTLFLDERQGIAKGVLTQKLGPWKRPVAYLSKKLDPVAAGWPPCLRIMAATAMLVKDSAKLTLGQPLTVITPHTLEAIVRQPPDRWITNARLTHYQALLLDTDRVQFGPPVTLNPATLLPVPENQPSPHDCRQVLAETHGTREDLKDQELPDADHTWYTDGSSYLDSGTRRAGAAVVDGHNTIWAQSLPPGTSAQKAELIALTKALELSKGKKANIYTDSRYAFATAHTHGSIYERRGWLTSEGKEIKNKAEIIALLKALFLPQEVAIIHCPGHQKGQDPVAVGNRQADRVARQAAMAEVLTLATEPDNTSHITAGKRTADGSEFEKRTADGSEFESPKKKAKVE

SEQ ID NO: 7082 - protein, 2095 aa, synthetic construct
MPAAKRVKLDGGDKKYSIGLDIGTNSVGWAVITDEYKVPSKKFKVLGNTDRHSIKKNLIGALLFDSGETAEATRLKRTARRRYTRRKNRICYLQEIFSNEMAKVDDSFFHRLEESFLVEEDKKHERHPIFGNIVDEVAYHEKYPTIYHLRKKLVDSTDKADLRLIYLALAHMIKFRGHFLIEGDLNPDNSDVDKLFIQLVQTYNQLFEENPINASGVDAKAILSARLSKSRRLENLIAQLPGEKKNGLFGNLIALSLGLTPNFKSNFDLAEDAKLQLSKDTYDDDLDNLLAQIGDQYADLFLAAKNLSDAILLSDILRVNTEITKAPLSASMIKRYDEHHQDLTLLKALVRQQLPEKYKEIFFDQSKNGYAGYIDGGASQEEFYKFIKPILEKMDGTEELLVKLNREDLLRKQRTFDNGSIPHQIHLGELHAILRRQEDFYPFLKDNREKIEKILTFRIPYYVGPLARGNSRFAWMTRKSEETITPWNFEEVVDKGASAQSFIERMTNFDKNLPNEKVLPKHSLLYEYFTVYNELTKVKYVTEGMRKPAFLSGEQKKAIVDLLFKTNRKVTVKQLKEDYFKKIECFDSVEISGVEDRFNASLGTYHDLLKIIKDKDFLDNEENEDILEDIVLTLTLFEDREMIEERLKTYAHLFDDKVMKQLKRRRYTGWGRLSRKLINGIRDKQSGKTILDFLKSDGFANRNFMQLIHDDSLTFKEDIQKAQVSGQGDSLHEHIANLAGSPAIKKGILQTVKVVDELVKVMGRHKPENIVIEMARENQTTQKGQKNSRERMKRIEEGIKELGSQILKEHPVENTQLQNEKLYLYYLQNGRDMYVDQELDINRLSDYDVDHIVPQSFLKDDSIDNKVLTRSDKARGKSDNVPSEEVVKKMKNYWRQLLNAKLITQRKFDNLTKAERGGLSELDKAGFIKRQLVETRQITKHVAQILDSRMNTKYDENDKLIREVKVITLKSKLVSDFRKDFQFYKVREINNYHHAHDAYLNAVVGTALIKKYPKLESEFVYGDYKVYDVRKMIAKSEQEIGKATAKYFFYSNIMNFFKTEITLANGEIRKRPLIETNGETGEIVWDKGRDFATVRKVLSMPQVNIVKKTEVQTGGFSKESILPKRNSDKLIARKKDWDPKKYGGFDSPTVAYSVLVVAKVEKGKSKKLKSVKELLGITIMERSSFEKNPIDFLEAKGYKEVKKDLIIKLPKYSLFELENGRKRMLASAGELQKGNELALPSKYVNFLYLASHYEKLKGSPEDNEQKQLFVEQHKHYLDEIIEQISEFSKRVILADANLDKVLSAYNKHRDKPIREQAENIIHLFTLTNLGAPAAFKYFDTTIDRKRYTSTKEVLDATLIHQSITGLYETRIDLSQLGGDGGGSSEAAAKGGSGGTLQLEEEYRLFEPESTQKQEMDIWLKNFPQAWAETGGMGTAHCQAPVLIQLKATATPISIRQYPMPHEAYQGIKPHIRRMLDQGILKPCQSPWNTPLLPVKKPGTEDYRPVQDLREVNKRVEDIHPTVPNPYNLLSTLPPSHPWYTVLDLKDAFFCLRLHSESQLLFAFEWRDPEIGLSGQLTWTRLPQGFKNSPTLFNEALHSDLADFRVRYPALVLLQYVDDLLLAAATRTECLEGTKALLETLGNKGYRASAKKAQICLQEVTYLGYSLKDGQRWLTKARKEAILSIPVPKNSRQVREFLGTAGYCRLWIPGFAELAAPLYPLTRPGTLFQWGTEQQLAFEDIKKALLSSPALGLPDITKPFELFIDENSGFAKGVLVQKLGPWKRPVAYLSKKLDTVASGWPPCLRMVAAIAILVKDAGKLTLGQPLTILTSHPVEALVRQPPNKWLSNARMTHYQAMLLDAERVHFGPTVSLNPATLLPLPSGGNHHDCLQILAETHGTRPDLTDQPLPDADLTWYTDGSSFIRNGEREAGAAVTTESEVIWAAPLPPGTSAQRAELIALTQALKMAEGKKLTVYTDSRYAFATTHVHGEIYRRRGWLTSEGKEIKNKNEILALLEALFLPKRLSIIHCPGHQKGDSPQAKGNRLADDTAKKAATETHSSLTVLPAGKRTADGSEFEKRTADGSEFESPKKKAKVE

SEQ ID NO: 7083 - protein, 2176 aa, synthetic construct
MPAAKRVKLDGGDKKYSIGLDIGTNSVGWAVITDEYKVPSKKFKVLGNTDRHSIKKNLIGALLFDSGETAEATRLKRTARRRYTRRKNRICYLQEIFSNEMAKVDDSFFHRLEESFLVEEDKKHERHPIFGNIVDEVAYHEKYPTIYHLRKKLVDSTDKADLRLIYLALAHMIKFRGHFLIEGDLNPDNSDVDKLFIQLVQTYNQLFEENPINASGVDAKAILSARLSKSRRLENLIAQLPGEKKNGLFGNLIALSLGLTPNFKSNFDLAEDAKLQLSKDTYDDDLDNLLAQIGDQYADLFLAAKNLSDAILLSDILRVNTEITKAPLSASMIKRYDEHHQDLTLLKALVRQQLPEKYKEIFFDQSKNGYAGYIDGGASQEEFYKFIKPILEKMDGTEELLVKLNREDLLRKQRTFDNGSIPHQIHLGELHAILRRQEDFYPFLKDNREKIEKILTFRIPYYVGPLARGNSRFAWMTRKSEETITPWNFEEVVDKGASAQSFIERMTNFDKNLPNEKVLPKHSLLYEYFTVYNELTKVKYVTEGMRKPAFLSGEQKKAIVDLLFKTNRKVTVKQLKEDYFKKIECFDSVEISGVEDRFNASLGTYHDLLKIIKDKDFLDNEENEDILEDIVLTLTLFEDREMIEERLKTYAHLFDDKVMKQLKRRRYTGWGRLSRKLINGIRDKQSGKTILDFLKSDGFANRNFMQLIHDDSLTFKEDIQKAQVSGQGDSLHEHIANLAGSPAIKKGILQTVKVVDELVKVMGRHKPENIVIEMARENQTTQKGQKNSRERMKRIEEGIKELGSQILKEHPVENTQLQNEKLYLYYLQNGRDMYVDQELDINRLSDYDVDHIVPQSFLKDDSIDNKVLTRSDKARGKSDNVPSEEVVKKMKNYWRQLLNAKLITQRKFDNLTKAERGGLSELDKAGFIKRQLVETRQITKHVAQILDSRMNTKYDENDKLIREVKVITLKSKLVSDFRKDFQFYKVREINNYHHAHDAYLNAVVGTALIKKYPKLESEFVYGDYKVYDVRKMIAKSEQEIGKATAKYFFYSNIMNFFKTEITLANGEIRKRPLIETNGETGEIVWDKGRDFATVRKVLSMPQVNIVKKTEVQTGGFSKESILPKRNSDKLIARKKDWDPKKYGGFDSPTVAYSVLVVAKVEKGKSKKLKSVKELLGITIMERSSFEKNPIDFLEAKGYKEVKKDLIIKLPKYSLFELENGRKRMLASAGELQKGNELALPSKYVNFLYLASHYEKLKGSPEDNEQKQLFVEQHKHYLDEIIEQISEFSKRVILADANLDKVLSAYNKHRDKPIREQAENIIHLFTLTNLGAPAAFKYFDTTIDRKRYTSTKEVLDATLIHQSITGLYETRIDLSQLGGDGGGSSEAAAKGGSGGMNPLQLLQPLPAEIKGTKLLAHWNSGATITCIPESFLEDEQPIKKTLIKTIHGEKQQNVYYVTFKVKGRKVEAEVIASPYEYILLSPTDVPWLTQQPLQLTILVPLQEYQEKILSKTALPEDQKQQLKTLFVKYDNLWQHWENQVGHRKIRPHNIATGDYPPRPQKQYPINPKAKPSIQIVIDDLLKQGVLTPQNSTMNTPVYPVPKPDGRWRMVLDYREVNKTIPLTAAQNQHSAGILATIVRQKYKTTLDLANGFWAHPITPESYWLTAFTWQGKQYCWTRLPQGFLNSPALFTADVVDLLKEIPNVQVYVDDIYLSHDDPKEHVQQLEKVFQILLQAGYVVSLKKSEIGQKTVEFLGFNITKEGRGLTDTFKTKLLNITPPKDLKQLQSILGLLNFARNFIPNFAELVQPLYNLIASAKGKYIEWSEENTKQLNMVIEALNTASNLEERLPEQRLVIKVNTSPSAGYVRYYNETGKKPIMYLNYVFSKAELKFSMLEKLLTTMHKALIKAMDLAMGQEILVYSPIVSMTKIQKTPLPERKALPIRWITWMTYLEDPRIQFHYDKTLPELKHIPDVYTSSQSPVKHPSQYEGVFYTDGSAIKSPDPTKSNNAGMGIVHATYKPEYQVLNQWSIPLGNHTAQMAEIAAVEFACKKALKIPGPVLVITDSFYVAESANKELPYWKSNGFVNNKKKPLKHISKWKSIAECLSMKPDITIQHEKGISLQIPVFILKGNALADKLATQGSYVVNAGKRTADGSEFEKRTADGSEFESPKKKAKVE

SEQ ID NO: 7084 - protein, 2218 aa, synthetic construct
MPAAKRVKLDGGDKKYSIGLDIGTNSVGWAVITDEYKVPSKKFKVLGNTDRHSIKKNLIGALLFDSGETAEATRLKRTARRRYTRRKNRICYLQEIFSNEMAKVDDSFFHRLEESFLVEEDKKHERHPIFGNIVDEVAYHEKYPTIYHLRKKLVDSTDKADLRLIYLALAHMIKFRGHFLIEGDLNPDNSDVDKLFIQLVQTYNQLFEENPINASGVDAKAILSARLSKSRRLENLIAQLPGEKKNGLFGNLIALSLGLTPNFKSNFDLAEDAKLQLSKDTYDDDLDNLLAQIGDQYADLFLAAKNLSDAILLSDILRVNTEITKAPLSASMIKRYDEHHQDLTLLKALVRQQLPEKYKEIFFDQSKNGYAGYIDGGASQEEFYKFIKPILEKMDGTEELLVKLNREDLLRKQRTFDNGSIPHQIHLGELHAILRRQEDFYPFLKDNREKIEKILTFRIPYYVGPLARGNSRFAWMTRKSEETITPWNFEEVVDKGASAQSFIERMTNFDKNLPNEKVLPKHSLLYEYFTVYNELTKVKYVTEGMRKPAFLSGEQKKAIVDLLFKTNRKVTVKQLKEDYFKKIECFDSVEISGVEDRFNASLGTYHDLLKIIKDKDFLDNEENEDILEDIVLTLTLFEDREMIEERLKTYAHLFDDKVMKQLKRRRYTGWGRLSRKLINGIRDKQSGKTILDFLKSDGFANRNFMQLIHDDSLTFKEDIQKAQVSGQGDSLHEHIANLAGSPAIKKGILQTVKVVDELVKVMGRHKPENIVIEMARENQTTQKGQKNSRERMKRIEEGIKELGSQILKEHPVENTQLQNEKLYLYYLQNGRDMYVDQELDINRLSDYDVDHIVPQSFLKDDSIDNKVLTRSDKARGKSDNVPSEEVVKKMKNYWRQLLNAKLITQRKFDNLTKAERGGLSELDKAGFIKRQLVETRQITKHVAQILDSRMNTKYDENDKLIREVKVITLKSKLVSDFRKDFQFYKVREINNYHHAHDAYLNAVVGTALIKKYPKLESEFVYGDYKVYDVRKMIAKSEQEIGKATAKYFFYSNIMNFFKTEITLANGEIRKRPLIETNGETGEIVWDKGRDFATVRKVLSMPQVNIVKKTEVQTGGFSKESILPKRNSDKLIARKKDWDPKKYGGFDSPTVAYSVLVVAKVEKGKSKKLKSVKELLGITIMERSSFEKNPIDFLEAKGYKEVKKDLIIKLPKYSLFELENGRKRMLASAGELQKGNELALPSKYVNFLYLASHYEKLKGSPEDNEQKQLFVEQHKHYLDEIIEQISEFSKRVILADANLDKVLSAYNKHRDKPIREQAENIIHLFTLTNLGAPAAFKYFDTTIDRKRYTSTKEVLDATLIHQSITGLYETRIDLSQLGGDGGGSSEAAAKGGSGGTLGDQGSRGSDPLPEPRVTLTVEGIPTEFLVNTGAEHSVLTKPMGKMGSKRTVVAGATGSKVYPWTTKRLLKIGQKQVTHSFLVIPECPAPLLGRDLLTKLKAQIQFSTEGPQVTWEDRPAMCLVLNLEEEYRLHEKPVPPSIDPSWLQLFPMVWAEKAGMGLANQVPPVVVELKSDASPVAVRQYPMSKEAREGIRPHIQRFLDLGILVPCQSPWNTPLLPVKKPGTNDYRPVQDLREVNKRVQDIHPTVPNPYNLLSSLPPSHTWYSVLDLKDAFFCLKLHPNSQPLFAFEWRDPEKGNTGQLTWTRLPQGFKNSPTLFNEALHRDLASFRALNPQVVMLQYVDDLLVAAPTYRDCKEGTRRLLQELSKLGYRVSAKKAQLCREEVTYLGYLLKGGKRWLTPARKATVMKIPTPTTPRQVREFLGTAGFCRLWIPGFASLAAPLYPLTRPKVPFTWTEAHQEAFGRIKEALLSAPALALPDLTKPFALYVDEKEGVARGVLTQTLGPWRRPVAYLSKKLDPVASGWPTCLKAIAAVALLLKDADKLTLGQNVLVIAPHNLESIVRQPPDRWMTNARMTHYQSLLLNERVSFAPPAILNPATLLPVESDDTPIHICSEILAEETGTRPDLRDQPLPGVPAWYTDGSSFIMDGRRQAGAAIVDNKRTVWASNLPEGTSAQKAELIALTQALRLAEGKSINIYTDSRYAFATAHVHGAIYKQRGWLTSAGKDIKNKEEILALLEAIHLPKRVAIIHCPGHQRGTDPVATGNRKADEAAKQAAQSTRILTETTKNAGKRTADGSEFEKRTADGSEFESPKKKAKVE

SEQ ID NO: 7085 - protein, 2096 aa, synthetic construct
MPAAKRVKLDGGDKKYSIGLDIGTNSVGWAVITDEYKVPSKKFKVLGNTDRHSIKKNLIGALLFDSGETAEATRLKRTARRRYTRRKNRICYLQEIFSNEMAKVDDSFFHRLEESFLVEEDKKHERHPIFGNIVDEVAYHEKYPTIYHLRKKLVDSTDKADLRLIYLALAHMIKFRGHFLIEGDLNPDNSDVDKLFIQLVQTYNQLFEENPINASGVDAKAILSARLSKSRRLENLIAQLPGEKKNGLFGNLIALSLGLTPNFKSNFDLAEDAKLQLSKDTYDDDLDNLLAQIGDQYADLFLAAKNLSDAILLSDILRVNTEITKAPLSASMIKRYDEHHQDLTLLKALVRQQLPEKYKEIFFDQSKNGYAGYIDGGASQEEFYKFIKPILEKMDGTEELLVKLNREDLLRKQRTFDNGSIPHQIHLGELHAILRRQEDFYPFLKDNREKIEKILTFRIPYYVGPLARGNSRFAWMTRKSEETITPWNFEEVVDKGASAQSFIERMTNFDKNLPNEKVLPKHSLLYEYFTVYNELTKVKYVTEGMRKPAFLSGEQKKAIVDLLFKTNRKVTVKQLKEDYFKKIECFDSVEISGVEDRFNASLGTYHDLLKIIKDKDFLDNEENEDILEDIVLTLTLFEDREMIEERLKTYAHLFDDKVMKQLKRRRYTGWGRLSRKLINGIRDKQSGKTILDFLKSDGFANRNFMQLIHDDSLTFKEDIQKAQVSGQGDSLHEHIANLAGSPAIKKGILQTVKVVDELVKVMGRHKPENIVIEMARENQTTQKGQKNSRERMKRIEEGIKELGSQILKEHPVENTQLQNEKLYLYYLQNGRDMYVDQELDINRLSDYDVDHIVPQSFLKDDSIDNKVLTRSDKARGKSDNVPSEEVVKKMKNYWRQLLNAKLITQRKFDNLTKAERGGLSELDKAGFIKRQLVETRQITKHVAQILDSRMNTKYDENDKLIREVKVITLKSKLVSDFRKDFQFYKVREINNYHHAHDAYLNAVVGTALIKKYPKLESEFVYGDYKVYDVRKMIAKSEQEIGKATAKYFFYSNIMNFFKTEITLANGEIRKRPLIETNGETGEIVWDKGRDFATVRKVLSMPQVNIVKKTEVQTGGFSKESILPKRNSDKLIARKKDWDPKKYGGFDSPTVAYSVLVVAKVEKGKSKKLKSVKELLGITIMERSSFEKNPIDFLEAKGYKEVKKDLIIKLPKYSLFELENGRKRMLASAGELQKGNELALPSKYVNFLYLASHYEKLKGSPEDNEQKQLFVEQHKHYLDEIIEQISEFSKRVILADANLDKVLSAYNKHRDKPIREQAENIIHLFTLTNLGAPAAFKYFDTTIDRKRYTSTKEVLDATLIHQSITGLYETRIDLSQLGGDGGGSSEAAAKGGSGGTLNLEDEYRLYETSAEPEVSPGSTWLSDFPQAWAETGGMGLAVRQAPLIIPLKATSTPVSIKQYPMSQEAKLGIKPHIQRLLDQGILVPCQSPWNTPLLPVKKPGTNDYRPVQDLREVNKRVEDIHPTVPNPYNLLSGLPPSHRWYTVLDLKDAFFCLRLHPTSQPLFAFEWRDPGMGISGQLTWTRLPQGFKNSPTLFNEALHRDLADFRIQHPDLILLQYVDDILLAATSELDCQQGTRALLLTLGNLGYRASAKKAQLCQKQVKYLGYLLKEGQRWLTEARKETVMGQPTPKTPRQLREFLGTAGFCRLWIPGFAEMAAPLYPLTKPGTLFNWGPDQQKAYQEIKQALLTAPALGLPDLTKPFELFVDEKQGYAKGVLTQKLGPWRRPVAYLSKKLDPVAAGWPPCLRMVAAIAVLRKDAGKLTMGQPLVILAPHAVEALVKQPPDRWLSNARMTHYQAMLLDTDRVQFGPVVALNPATLLPLPEEGAPHDCLEILAETHGTRPDLTDQPIPDADHTWYTDGSSFLQEGQRKAGAAVTTETEVIWARALPAGTSAQRAELIALTQALKMAEGKRLNVYTDSRYAFATAHIHGEIYRRRGWLTSEGREIKNKSEILALLKALFLPKRLSIIHCLGHQKGDSAEARGNRLADQAAREAAIKTPPDTSTLLAGKRTADGSEFEKRTADGSEFESPKKKAKVE

SEQ ID NO: 7086 - protein, 2096 aa, synthetic construct
MPAAKRVKLDGGDKKYSIGLDIGTNSVGWAVITDEYKVPSKKFKVLGNTDRHSIKKNLIGALLFDSGETAEATRLKRTARRRYTRRKNRICYLQEIFSNEMAKVDDSFFHRLEESFLVEEDKKHERHPIFGNIVDEVAYHEKYPTIYHLRKKLVDSTDKADLRLIYLALAHMIKFRGHFLIEGDLNPDNSDVDKLFIQLVQTYNQLFEENPINASGVDAKAILSARLSKSRRLENLIAQLPGEKKNGLFGNLIALSLGLTPNFKSNFDLAEDAKLQLSKDTYDDDLDNLLAQIGDQYADLFLAAKNLSDAILLSDILRVNTEITKAPLSASMIKRYDEHHQDLTLLKALVRQQLPEKYKEIFFDQSKNGYAGYIDGGASQEEFYKFIKPILEKMDGTEELLVKLNREDLLRKQRTFDNGSIPHQIHLGELHAILRRQEDFYPFLKDNREKIEKILTFRIPYYVGPLARGNSRFAWMTRKSEETITPWNFEEVVDKGASAQSFIERMTNFDKNLPNEKVLPKHSLLYEYFTVYNELTKVKYVTEGMRKPAFLSGEQKKAIVDLLFKTNRKVTVKQLKEDYFKKIECFDSVEISGVEDRFNASLGTYHDLLKIIKDKDFLDNEENEDILEDIVLTLTLFEDREMIEERLKTYAHLFDDKVMKQLKRRRYTGWGRLSRKLINGIRDKQSGKTILDFLKSDGFANRNFMQLIHDDSLTFKEDIQKAQVSGQGDSLHEHIANLAGSPAIKKGILQTVKVVDELVKVMGRHKPENIVIEMARENQTTQKGQKNSRERMKRIEEGIKELGSQILKEHPVENTQLQNEKLYLYYLQNGRDMYVDQELDINRLSDYDVDHIVPQSFLKDDSIDNKVLTRSDKARGKSDNVPSEEVVKKMKNYWRQLLNAKLITQRKFDNLTKAERGGLSELDKAGFIKRQLVETRQITKHVAQILDSRMNTKYDENDKLIREVKVITLKSKLVSDFRKDFQFYKVREINNYHHAHDAYLNAVVGTALIKKYPKLESEFVYGDYKVYDVRKMIAKSEQEIGKATAKYFFYSNIMNFFKTEITLANGEIRKRPLIETNGETGEIVWDKGRDFATVRKVLSMPQVNIVKKTEVQTGGFSKESILPKRNSDKLIARKKDWDPKKYGGFDSPTVAYSVLVVAKVEKGKSKKLKSVKELLGITIMERSSFEKNPIDFLEAKGYKEVKKDLIIKLPKYSLFELENGRKRMLASAGELQKGNELALPSKYVNFLYLASHYEKLKGSPEDNEQKQLFVEQHKHYLDEIIEQISEFSKRVILADANLDKVLSAYNKHRDKPIREQAENIIHLFTLTNLGAPAAFKYFDTTIDRKRYTSTKEVLDATLIHQSITGLYETRIDLSQLGGDGGGSSEAAAKGGSGGTLGIEDEYRLHETSTEPDVSLGSTWLSDFPQAWAETGGMGLAVRQAPLIIPLKATSTPVSIQQYPMSHEARLGIKPHIQRLLDQGILVPCQSPWNTPLLPVKKPGTNDYRPVQDLREVNKRVEDIHPTVPNPYNLLSGLPPSHQWYTVLDLKDAFFCLRLHPTSQPLFAFEWRDPGMGISGQLTWTRLPQGFKNSPTLFNEALHRDLADFRIQHPDLILLQYVDDILLAATSELDCQQGTRALLQTLGDLGYRASAKKAQICQKQVKYLGYLLREGQRWLTEARKETVMGQPVPKTPRQLREFLGTAGFCRLWIPGFAEMAAPLYPLTKPGTLFSWGPDQQKAYQEIKQALLTAPALGLPDLTKPFELFVDEKQGYAKGVLTQKLGPWRRPVAYLSKKLDPVAAGWPPCLRMVAAIAVLTKDAGKLTMGQPLVILAPHAVEALVKQPPDRWLSNARMTHYQAMLLDTDRVQFGPVVALNPATLLPLPEEGAPHDCLEILAETHGTRPDLTDQPIPDADHTWYTDGSSFLQEGQRKAGAAVTTETEVIWAGALPAGTSAQRAELIALTQALKMAEGKRLNVYTDSRYAFATAHIHGEIYRRRGWLTSEGREIKNKSEILALLKALFLPKRLSIIHCLGHQKGDSAEARGNRLADQAAREAAIKTPPDTSTLLAGKRTADGSEFEKRTADGSEFESPKKKAKVE

SEQ ID NO: 7087 - protein, 2096 aa, synthetic construct
MPAAKRVKLDGGDKKYSIGLDIGTNSVGWAVITDEYKVPSKKFKVLGNTDRHSIKKNLIGALLFDSGETAEATRLKRTARRRYTRRKNRICYLQEIFSNEMAKVDDSFFHRLEESFLVEEDKKHERHPIFGNIVDEVAYHEKYPTIYHLRKKLVDSTDKADLRLIYLALAHMIKFRGHFLIEGDLNPDNSDVDKLFIQLVQTYNQLFEENPINASGVDAKAILSARLSKSRRLENLIAQLPGEKKNGLFGNLIALSLGLTPNFKSNFDLAEDAKLQLSKDTYDDDLDNLLAQIGDQYADLFLAAKNLSDAILLSDILRVNTEITKAPLSASMIKRYDEHHQDLTLLKALVRQQLPEKYKEIFFDQSKNGYAGYIDGGASQEEFYKFIKPILEKMDGTEELLVKLNREDLLRKQRTFDNGSIPHQIHLGELHAILRRQEDFYPFLKDNREKIEKILTFRIPYYVGPLARGNSRFAWMTRKSEETITPWNFEEVVDKGASAQSFIERMTNFDKNLPNEKVLPKHSLLYEYFTVYNELTKVKYVTEGMRKPAFLSGEQKKAIVDLLFKTNRKVTVKQLKEDYFKKIECFDSVEISGVEDRFNASLGTYHDLLKIIKDKDFLDNEENEDILEDIVLTLTLFEDREMIEERLKTYAHLFDDKVMKQLKRRRYTGWGRLSRKLINGIRDKQSGKTILDFLKSDGFANRNFMQLIHDDSLTFKEDIQKAQVSGQGDSLHEHIANLAGSPAIKKGILQTVKVVDELVKVMGRHKPENIVIEMARENQTTQKGQKNSRERMKRIEEGIKELGSQILKEHPVENTQLQNEKLYLYYLQNGRDMYVDQELDINRLSDYDVDHIVPQSFLKDDSIDNKVLTRSDKARGKSDNVPSEEVVKKMKNYWRQLLNAKLITQRKFDNLTKAERGGLSELDKAGFIKRQLVETRQITKHVAQILDSRMNTKYDENDKLIREVKVITLKSKLVSDFRKDFQFYKVREINNYHHAHDAYLNAVVGTALIKKYPKLESEFVYGDYKVYDVRKMIAKSEQEIGKATAKYFFYSNIMNFFKTEITLANGEIRKRPLIETNGETGEIVWDKGRDFATVRKVLSMPQVNIVKKTEVQTGGFSKESILPKRNSDKLIARKKDWDPKKYGGFDSPTVAYSVLVVAKVEKGKSKKLKSVKELLGITIMERSSFEKNPIDFLEAKGYKEVKKDLIIKLPKYSLFELENGRKRMLASAGELQKGNELALPSKYVNFLYLASHYEKLKGSPEDNEQKQLFVEQHKHYLDEIIEQISEFSKRVILADANLDKVLSAYNKHRDKPIREQAENIIHLFTLTNLGAPAAFKYFDTTIDRKRYTSTKEVLDATLIHQSITGLYETRIDLSQLGGDGGGSSEAAAKGGSGGTLNIEDEYRLHETSKGPDVPLGSTWLSDFPQAWAETGGMGLAVRQAPLIIPLKATSTPVSIKQYPMSQEARLGIKPHIQRLLDQGILVPCQSPWNTPLLPVKKPGTNDYRPVQDLREVNKRVEDIHPTVPNPYNLLSGLPPSHQWYTVLDLKDAFFCLRLHPTSQSLFAFEWRDPEMGISGQLTWTRLPQGFKNSPTLFNEALHRDLADFRIQHPDLILLQYVDDLLLAATSELDCQQGTRALLQTLGDLGYRASAKKAQICQKQVKYLGYLLKEGQRWLTEARKETVMGQPTPKTPRQLREFLGTAGFCRLWIPGFAEMAAPLYPLTKPGTLFEWGPDQQKAYQEIKQALLTAPALGLPDLTKPFELFVDEKQGYAKGVLTQKLGPWRRPVAYLSKKLDPVAAGWPPCLRMVAAIAVLTKDAGKLTMGQPLVILAPHAVEALVKQPPDRWLSNARMTHYQALLLDTDRVQFGPIVALNPATLLPLPEEGLQHDCLDILAEAHGTRPDLTDQPLPDADHTWYTDGSSFLQEGQRKAGAAVTTETEVVWAKALPAGTSAQRAELIALTQALKMAEGKKLNVYTDSRYAFATAHIHGEIYRRRGWLTSEGKEIKNKDEILALLKALFLPKRLSIIHCPGHQKGNRAEARGNRMADQAAREVATRETPETSTLLAGKRTADGSEFEKRTADGSEFESPKKKAKVE

SEQ ID NO: 7088 - protein, 2096 aa, synthetic construct
MPAAKRVKLDGGDKKYSIGLDIGTNSVGWAVITDEYKVPSKKFKVLGNTDRHSIKKNLIGALLFDSGETAEATRLKRTARRRYTRRKNRICYLQEIFSNEMAKVDDSFFHRLEESFLVEEDKKHERHPIFGNIVDEVAYHEKYPTIYHLRKKLVDSTDKADLRLIYLALAHMIKFRGHFLIEGDLNPDNSDVDKLFIQLVQTYNQLFEENPINASGVDAKAILSARLSKSRRLENLIAQLPGEKKNGLFGNLIALSLGLTPNFKSNFDLAEDAKLQLSKDTYDDDLDNLLAQIGDQYADLFLAAKNLSDAILLSDILRVNTEITKAPLSASMIKRYDEHHQDLTLLKALVRQQLPEKYKEIFFDQSKNGYAGYIDGGASQEEFYKFIKPILEKMDGTEELLVKLNREDLLRKQRTFDNGSIPHQIHLGELHAILRRQEDFYPFLKDNREKIEKILTFRIPYYVGPLARGNSRFAWMTRKSEETITPWNFEEVVDKGASAQSFIERMTNFDKNLPNEKVLPKHSLLYEYFTVYNELTKVKYVTEGMRKPAFLSGEQKKAIVDLLFKTNRKVTVKQLKEDYFKKIECFDSVEISGVEDRFNASLGTYHDLLKIIKDKDFLDNEENEDILEDIVLTLTLFEDREMIEERLKTYAHLFDDKVMKQLKRRRYTGWGRLSRKLINGIRDKQSGKTILDFLKSDGFANRNFMQLIHDDSLTFKEDIQKAQVSGQGDSLHEHIANLAGSPAIKKGILQTVKVVDELVKVMGRHKPENIVIEMARENQTTQKGQKNSRERMKRIEEGIKELGSQILKEHPVENTQLQNEKLYLYYLQNGRDMYVDQELDINRLSDYDVDHIVPQSFLKDDSIDNKVLTRSDKARGKSDNVPSEEVVKKMKNYWRQLLNAKLITQRKFDNLTKAERGGLSELDKAGFIKRQLVETRQITKHVAQILDSRMNTKYDENDKLIREVKVITLKSKLVSDFRKDFQFYKVREINNYHHAHDAYLNAVVGTALIKKYPKLESEFVYGDYKVYDVRKMIAKSEQEIGKATAKYFFYSNIMNFFKTEITLANGEIRKRPLIETNGETGEIVWDKGRDFATVRKVLSMPQVNIVKKTEVQTGGFSKESILPKRNSDKLIARKKDWDPKKYGGFDSPTVAYSVLVVAKVEKGKSKKLKSVKELLGITIMERSSFEKNPIDFLEAKGYKEVKKDLIIKLPKYSLFELENGRKRMLASAGELQKGNELALPSKYVNFLYLASHYEKLKGSPEDNEQKQLFVEQHKHYLDEIIEQISEFSKRVILADANLDKVLSAYNKHRDKPIREQAENIIHLFTLTNLGAPAAFKYFDTTIDRKRYTSTKEVLDATLIHQSITGLYETRIDLSQLGGDGGGSSEAAAKGGSGGTLNIEDEHRLHETSKEPDVSLGSTWLSDFPQAWAETGGMGLAVRQAPLIIPLKATSTPVSIKQYPMSQEARLGIKPHIQRLLDQGILVPCQSPWNTPLLPVKKPGTNDYRPVQDLREVNKRVEDIHPTVPNPYNLLSGLPPSHQWYTVLDLKDAFFCLRLHPTSQPLFAFEWRDPEMGISGQLTWTRLPQGFKNSPTLFDEALHRDLADFRIQHPDLILLQYVDDLLLAATSELDCQQGTRALLQTLGNLGYRASAKKAQICQKQVKYLGYLLKEGQRWLTEARKETVMGQPTPKTPRQLREFLGTAGFCRLWIPGFAEMAAPLYPLTKTGTLFNWGPDQQKAYQEIKQALLTAPALGLPDLTKPFELFVDEKQGYAKGVLTQKLGPWRRPVAYLSKKLDPVAAGWPPCLRMVAAIAVLTKDAGKLTMGQPLVILAPHAVEALVKQPPDRWLSNARMTHYQALLLDTDRVQFGPVVALNPATLLPLPEEGLQHNCLDILAEAHGTRPDLTDQPLPDADHTWYTDGSSLLQEGQRKAGAAVTTETEVIWAKALPAGTSAQRAELIALTQALKMAEGKKLNVYTDSRYAFATAHIHGEIYRRRGLLTSEGKEIKNKDEILALLKALFLPKRLSIIHCPGHQKGHSAEARGNRMADQAARKAAITETPDTSTLLAGKRTADGSEFEKRTADGSEFESPKKKAKVE

SEQ ID NO: 7089 - protein, 2096 aa, synthetic construct
MPAAKRVKLDGGDKKYSIGLDIGTNSVGWAVITDEYKVPSKKFKVLGNTDRHSIKKNLIGALLFDSGETAEATRLKRTARRRYTRRKNRICYLQEIFSNEMAKVDDSFFHRLEESFLVEEDKKHERHPIFGNIVDEVAYHEKYPTIYHLRKKLVDSTDKADLRLIYLALAHMIKFRGHFLIEGDLNPDNSDVDKLFIQLVQTYNQLFEENPINASGVDAKAILSARLSKSRRLENLIAQLPGEKKNGLFGNLIALSLGLTPNFKSNFDLAEDAKLQLSKDTYDDDLDNLLAQIGDQYADLFLAAKNLSDAILLSDILRVNTEITKAPLSASMIKRYDEHHQDLTLLKALVRQQLPEKYKEIFFDQSKNGYAGYIDGGASQEEFYKFIKPILEKMDGTEELLVKLNREDLLRKQRTFDNGSIPHQIHLGELHAILRRQEDFYPFLKDNREKIEKILTFRIPYYVGPLARGNSRFAWMTRKSEETITPWNFEEVVDKGASAQSFIERMTNFDKNLPNEKVLPKHSLLYEYFTVYNELTKVKYVTEGMRKPAFLSGEQKKAIVDLLFKTNRKVTVKQLKEDYFKKIECFDSVEISGVEDRFNASLGTYHDLLKIIKDKDFLDNEENEDILEDIVLTLTLFEDREMIEERLKTYAHLFDDKVMKQLKRRRYTGWGRLSRKLINGIRDKQSGKTILDFLKSDGFANRNFMQLIHDDSLTFKEDIQKAQVSGQGDSLHEHIANLAGSPAIKKGILQTVKVVDELVKVMGRHKPENIVIEMARENQTTQKGQKNSRERMKRIEEGIKELGSQILKEHPVENTQLQNEKLYLYYLQNGRDMYVDQELDINRLSDYDVDHIVPQSFLKDDSIDNKVLTRSDKARGKSDNVPSEEVVKKMKNYWRQLLNAKLITQRKFDNLTKAERGGLSELDKAGFIKRQLVETRQITKHVAQILDSRMNTKYDENDKLIREVKVITLKSKLVSDFRKDFQFYKVREINNYHHAHDAYLNAVVGTALIKKYPKLESEFVYGDYKVYDVRKMIAKSEQEIGKATAKYFFYSNIMNFFKTEITLANGEIRKRPLIETNGETGEIVWDKGRDFATVRKVLSMPQVNIVKKTEVQTGGFSKESILPKRNSDKLIARKKDWDPKKYGGFDSPTVAYSVLVVAKVEKGKSKKLKSVKELLGITIMERSSFEKNPIDFLEAKGYKEVKKDLIIKLPKYSLFELENGRKRMLASAGELQKGNELALPSKYVNFLYLASHYEKLKGSPEDNEQKQLFVEQHKHYLDEIIEQISEFSKRVILADANLDKVLSAYNKHRDKPIREQAENIIHLFTLTNLGAPAAFKYFDTTIDRKRYTSTKEVLDATLIHQSITGLYETRIDLSQLGGDGGGSSEAAAKGGSGGTLNIEDEHRLHETSKEPDVSLGSTWLSDFPQAWAETGGMGLAVRQAPLIIPLKATSTPVSIKQYPMSQEARLGIKPHIQRLLDQGILVPCQSPWNTPLLPVKKPGTNDYRPVQDLREVNKRVEDIHPTVPNPYNLLSGLPPSHQWYTVLDLKDAFFCLRLHPTSQPLFAFEWRDPEMGISGQLTWTRLPQGFKNSPTLFNEALHRDLADFRIQHPDLILLQYVDDLLLAATSELDCQQGTRALLQTLGNLGYRASAKKAQICQKQVKYLGYLLKEGQRWLTEARKETVMGQPTPKTPRQLREFLGTAGFCRLWIPGFAEMAAPLYPLTKPGTLFNWGPDQQKAYQEIKQALLTAPALGLPDLTKPFELFVDEKQGYAKGVLTQKLGPWRRPVAYLSKKLDPVAAGWPPCLRMVAAIAVLTKDAGKLTMGQPLVILAPHAVEALVKQPPDRWLSNARMTHYQALLLDTDRVQFGPVVALNPATLLPLPEEGLQHNCLDILAEAHGTRPDLTDQPLPDADHTWYTDGSSLLQEGQRKAGAAVTTETEVIWAKALPAGTSAQRAELIALTQALKMAEGKKLNVYTDSRYAFATAHIHGEIYRRRGWLTSEGKEIKNKDEILALLKALFLPKRLSIIHCPGHQKGHSAEARGNRMADQAARKAAITETPDTSTLLAGKRTADGSEFEKRTADGSEFESPKKKAKVE

SEQ ID NO: 7090 - protein, 2087 aa, synthetic construct
MPAAKRVKLDGGDKKYSIGLDIGTNSVGWAVITDEYKVPSKKFKVLGNTDRHSIKKNLIGALLFDSGETAEATRLKRTARRRYTRRKNRICYLQEIFSNEMAKVDDSFFHRLEESFLVEEDKKHERHPIFGNIVDEVAYHEKYPTIYHLRKKLVDSTDKADLRLIYLALAHMIKFRGHFLIEGDLNPDNSDVDKLFIQLVQTYNQLFEENPINASGVDAKAILSARLSKSRRLENLIAQLPGEKKNGLFGNLIALSLGLTPNFKSNFDLAEDAKLQLSKDTYDDDLDNLLAQIGDQYADLFLAAKNLSDAILLSDILRVNTEITKAPLSASMIKRYDEHHQDLTLLKALVRQQLPEKYKEIFFDQSKNGYAGYIDGGASQEEFYKFIKPILEKMDGTEELLVKLNREDLLRKQRTFDNGSIPHQIHLGELHAILRRQEDFYPFLKDNREKIEKILTFRIPYYVGPLARGNSRFAWMTRKSEETITPWNFEEVVDKGASAQSFIERMTNFDKNLPNEKVLPKHSLLYEYFTVYNELTKVKYVTEGMRKPAFLSGEQKKAIVDLLFKTNRKVTVKQLKEDYFKKIECFDSVEISGVEDRFNASLGTYHDLLKIIKDKDFLDNEENEDILEDIVLTLTLFEDREMIEERLKTYAHLFDDKVMKQLKRRRYTGWGRLSRKLINGIRDKQSGKTILDFLKSDGFANRNFMQLIHDDSLTFKEDIQKAQVSGQGDSLHEHIANLAGSPAIKKGILQTVKVVDELVKVMGRHKPENIVIEMARENQTTQKGQKNSRERMKRIEEGIKELGSQILKEHPVENTQLQNEKLYLYYLQNGRDMYVDQELDINRLSDYDVDHIVPQSFLKDDSIDNKVLTRSDKARGKSDNVPSEEVVKKMKNYWRQLLNAKLITQRKFDNLTKAERGGLSELDKAGFIKRQLVETRQITKHVAQILDSRMNTKYDENDKLIREVKVITLKSKLVSDFRKDFQFYKVREINNYHHAHDAYLNAVVGTALIKKYPKLESEFVYGDYKVYDVRKMIAKSEQEIGKATAKYFFYSNIMNFFKTEITLANGEIRKRPLIETNGETGEIVWDKGRDFATVRKVLSMPQVNIVKKTEVQTGGFSKESILPKRNSDKLIARKKDWDPKKYGGFDSPTVAYSVLVVAKVEKGKSKKLKSVKELLGITIMERSSFEKNPIDFLEAKGYKEVKKDLIIKLPKYSLFELENGRKRMLASAGELQKGNELALPSKYVNFLYLASHYEKLKGSPEDNEQKQLFVEQHKHYLDEIIEQISEFSKRVILADANLDKVLSAYNKHRDKPIREQAENIIHLFTLTNLGAPAAFKYFDTTIDRKRYTSTKEVLDATLIHQSITGLYETRIDLSQLGGDGGGSSEAAAKGGSGGVPWLMKKPLQLTVLVPLHEYQERLLQQTALPKEQKELLQKLFLKYDALWQHWENQVGHRRIKPHNIATGTLAPRPQKQYPINPKAKPSIQIVIDDLLKQGVLIQQNSTMNTPVYPVPKPDGKWRMVLDYREVNKTIPLIAAQNQHSAGILSSIYRGKYKTTLDLTNGFWAHPITPESYWLTAFTWQGKQYCWTRLPQGFLNSPALFTADVVDLLKEIPNVQAYVDDIYISHDDPQEHLEQLEKIFSILLNAGYVVSLKKSEIAQREVEFLGFNITKEGRGLTDTFKQKLLNITPPKDLKQLQSILGLLNFARNFIPNYSELVKPLYTIVANANGKFISWTEDNSNQLQHIISVLNQADNLEERNPETRLIIKVNSSPSAGYIRYYNEGSKRPIMYVNYIFSKAEAKFTQTEKLLTTMHKGLIKAMDLAMGQEILVYSPIVSMTKIQRTPLPERKALPVRWITWMTYLEDPRIQFHYDKSLPELQQIPNVTEDVIAKTKHPSEFAMVFYTDGSAIKHPDVNKSHSAGMGIAQVQFIPEYKIVHQWSIPLGDHTAQLAEIAAVEFACKKALKISGPVLIVTDSFYVAESANKELPYWKSNGFLNNKKKPLRHVSKWKSIAECLQLKPDIIIMHEKGHQQPMTTLHTEGNNLADKLATQGSYVVHAGKRTADGSEFEKRTADGSEFESPKKKAKVE

SEQ ID NO: 7091 - protein, 2087 aa, synthetic construct
MPAAKRVKLDGGDKKYSIGLDIGTNSVGWAVITDEYKVPSKKFKVLGNTDRHSIKKNLIGALLFDSGETAEATRLKRTARRRYTRRKNRICYLQEIFSNEMAKVDDSFFHRLEESFLVEEDKKHERHPIFGNIVDEVAYHEKYPTIYHLRKKLVDSTDKADLRLIYLALAHMIKFRGHFLIEGDLNPDNSDVDKLFIQLVQTYNQLFEENPINASGVDAKAILSARLSKSRRLENLIAQLPGEKKNGLFGNLIALSLGLTPNFKSNFDLAEDAKLQLSKDTYDDDLDNLLAQIGDQYADLFLAAKNLSDAILLSDILRVNTEITKAPLSASMIKRYDEHHQDLTLLKALVRQQLPEKYKEIFFDQSKNGYAGYIDGGASQEEFYKFIKPILEKMDGTEELLVKLNREDLLRKQRTFDNGSIPHQIHLGELHAILRRQEDFYPFLKDNREKIEKILTFRIPYYVGPLARGNSRFAWMTRKSEETITPWNFEEVVDKGASAQSFIERMTNFDKNLPNEKVLPKHSLLYEYFTVYNELTKVKYVTEGMRKPAFLSGEQKKAIVDLLFKTNRKVTVKQLKEDYFKKIECFDSVEISGVEDRFNASLGTYHDLLKIIKDKDFLDNEENEDILEDIVLTLTLFEDREMIEERLKTYAHLFDDKVMKQLKRRRYTGWGRLSRKLINGIRDKQSGKTILDFLKSDGFANRNFMQLIHDDSLTFKEDIQKAQVSGQGDSLHEHIANLAGSPAIKKGILQTVKVVDELVKVMGRHKPENIVIEMARENQTTQKGQKNSRERMKRIEEGIKELGSQILKEHPVENTQLQNEKLYLYYLQNGRDMYVDQELDINRLSDYDVDHIVPQSFLKDDSIDNKVLTRSDKARGKSDNVPSEEVVKKMKNYWRQLLNAKLITQRKFDNLTKAERGGLSELDKAGFIKRQLVETRQITKHVAQILDSRMNTKYDENDKLIREVKVITLKSKLVSDFRKDFQFYKVREINNYHHAHDAYLNAVVGTALIKKYPKLESEFVYGDYKVYDVRKMIAKSEQEIGKATAKYFFYSNIMNFFKTEITLANGEIRKRPLIETNGETGEIVWDKGRDFATVRKVLSMPQVNIVKKTEVQTGGFSKESILPKRNSDKLIARKKDWDPKKYGGFDSPTVAYSVLVVAKVEKGKSKKLKSVKELLGITIMERSSFEKNPIDFLEAKGYKEVKKDLIIKLPKYSLFELENGRKRMLASAGELQKGNELALPSKYVNFLYLASHYEKLKGSPEDNEQKQLFVEQHKHYLDEIIEQISEFSKRVILADANLDKVLSAYNKHRDKPIREQAENIIHLFTLTNLGAPAAFKYFDTTIDRKRYTSTKEVLDATLIHQSITGLYETRIDLSQLGGDGGGSSEAAAKGGSGGIPWLMKKPLQLTTLVPLQEYEERLLKQTMLTGSYKEKLQSLFLKYDALWQHWENQVGHRRIKPHHIATGTVNPRPQKQYPINPKAKASIQTVINDLLKQGVLIQQNSIMNTPVYPVPKPDGKWRMVLDYREVNKTIPLIAAQNQHSAGILSSIFRGKYKTTLDLSNGFWAHSITPESYWLTAFTWLGQQYCWTRLPQGFLNSPALFNADVVDLLKEVPNVQVYVDDIYISHDDPREHLEQLEKVFSLLLNAGYVVSLKKSEIAQHEVEFLGFNITKEGRGLTETFKQKLLNITPPRDLKQLQSILGLLNFARNFIPNFSELVKPLYNIIATAPGKYITWTTDNSQQLQNIISMLNSAENLEERNPEVRLIMKVNTSPSAGYIRFYNEFAKRPIMYLNYVYTKAEVKFTNTEKLLTTIHKGLIKALDLGMGQEILVYSPIVSMTKIQKTPLPERKALPIRWITWMSYLEDPRIQFHYDKTLPELQQVPTVTDDIIAKIKHPSEFSMVFYTDGSAIKHPNVNKSHNAGMGIAQVQFKPEFTVINTWSIPLGDHTAQLAEVAAVEFACKKALKIDGPVLIVTDSFYVAESVNKELPYWQSNGFFNNKKKPLKHVSKWKSIADCIQLKPDIIIIHEKGHQPTASTFHTEGNNLADKLATQGSYVVNAGKRTADGSEFEKRTADGSEFESPKKKAKVE

SEQ ID NO: 7092 - protein, 2087 aa, synthetic construct
MPAAKRVKLDGGDKKYSIGLDIGTNSVGWAVITDEYKVPSKKFKVLGNTDRHSIKKNLIGALLFDSGETAEATRLKRTARRRYTRRKNRICYLQEIFSNEMAKVDDSFFHRLEESFLVEEDKKHERHPIFGNIVDEVAYHEKYPTIYHLRKKLVDSTDKADLRLIYLALAHMIKFRGHFLIEGDLNPDNSDVDKLFIQLVQTYNQLFEENPINASGVDAKAILSARLSKSRRLENLIAQLPGEKKNGLFGNLIALSLGLTPNFKSNFDLAEDAKLQLSKDTYDDDLDNLLAQIGDQYADLFLAAKNLSDAILLSDILRVNTEITKAPLSASMIKRYDEHHQDLTLLKALVRQQLPEKYKEIFFDQSKNGYAGYIDGGASQEEFYKFIKPILEKMDGTEELLVKLNREDLLRKQRTFDNGSIPHQIHLGELHAILRRQEDFYPFLKDNREKIEKILTFRIPYYVGPLARGNSRFAWMTRKSEETITPWNFEEVVDKGASAQSFIERMTNFDKNLPNEKVLPKHSLLYEYFTVYNELTKVKYVTEGMRKPAFLSGEQKKAIVDLLFKTNRKVTVKQLKEDYFKKIECFDSVEISGVEDRFNASLGTYHDLLKIIKDKDFLDNEENEDILEDIVLTLTLFEDREMIEERLKTYAHLFDDKVMKQLKRRRYTGWGRLSRKLINGIRDKQSGKTILDFLKSDGFANRNFMQLIHDDSLTFKEDIQKAQVSGQGDSLHEHIANLAGSPAIKKGILQTVKVVDELVKVMGRHKPENIVIEMARENQTTQKGQKNSRERMKRIEEGIKELGSQILKEHPVENTQLQNEKLYLYYLQNGRDMYVDQELDINRLSDYDVDHIVPQSFLKDDSIDNKVLTRSDKARGKSDNVPSEEVVKKMKNYWRQLLNAKLITQRKFDNLTKAERGGLSELDKAGFIKRQLVETRQITKHVAQILDSRMNTKYDENDKLIREVKVITLKSKLVSDFRKDFQFYKVREINNYHHAHDAYLNAVVGTALIKKYPKLESEFVYGDYKVYDVRKMIAKSEQEIGKATAKYFFYSNIMNFFKTEITLANGEIRKRPLIETNGETGEIVWDKGRDFATVRKVLSMPQVNIVKKTEVQTGGFSKESILPKRNSDKLIARKKDWDPKKYGGFDSPTVAYSVLVVAKVEKGKSKKLKSVKELLGITIMERSSFEKNPIDFLEAKGYKEVKKDLIIKLPKYSLFELENGRKRMLASAGELQKGNELALPSKYVNFLYLASHYEKLKGSPEDNEQKQLFVEQHKHYLDEIIEQISEFSKRVILADANLDKVLSAYNKHRDKPIREQAENIIHLFTLTNLGAPAAFKYFDTTIDRKRYTSTKEVLDATLIHQSITGLYETRIDLSQLGGDGGGSSEAAAKGGSGGIPWLMKKPLQLTTLVPLQEYEERLLKQTMLTGSYKEKLQSLFLKYDALWQHWENQVGHRRIKPHHIATGTVNPRPQKQYPINPKAKASIQTVINDLLKQGVLIQQNSIMNTPVYPVPKPDGKWRMVLDYREVNKTIPLIAAQNQHSAGILSSIFRGKYKTTLDLSNGFWAHSITPESYWLTAFTWLGQQYCWTRLPQGFLNSPALFNADVVDLLKEVPNVQVYVDDIYISHDDPREHLEQLEKVFSLLLNAGYVVSLKKSEIAQHEVEFLGFNITKEGRGLTETFKQKLLNITPPRDLKQLQSILGKLNFARNFIPNFSELVKPLYNIIATAPGKYITWTTDNSQQLQNIISMLNSAENLEERNPEVRLIMKVNTSPSAGYIRFYNEFAKRPIMYLNYVYTKAEVKFTNTEKLLTTIHKGLIKALDLGMGQEILVYSPIVSMTKIQKTPLPERKALPIRWITWMSYLEDPRIQFHYDKTLPELQQVPTVTDDIIAKIKHPSEFSMVFYTDGSAIKHPNVNKSHNAGMGIAQVQFKPEFTVINTWSIPLGDHTAQLAEVAAVEFACKKALKIDGPVLIVTDSFYVAESVNKELPYWQSNGFFNNKKKPLKHVSKWKSIADCIQLKPDIIIIHEKGHQPTASTFHTEGNNLADKLATQGSYVVNAGKRTADGSEFEKRTADGSEFESPKKKAKVE

SEQ ID NO: 7093 - protein, 2094 aa, synthetic construct
MPAAKRVKLDGGDKKYSIGLDIGTNSVGWAVITDEYKVPSKKFKVLGNTDRHSIKKNLIGALLFDSGETAEATRLKRTARRRYTRRKNRICYLQEIFSNEMAKVDDSFFHRLEESFLVEEDKKHERHPIFGNIVDEVAYHEKYPTIYHLRKKLVDSTDKADLRLIYLALAHMIKFRGHFLIEGDLNPDNSDVDKLFIQLVQTYNQLFEENPINASGVDAKAILSARLSKSRRLENLIAQLPGEKKNGLFGNLIALSLGLTPNFKSNFDLAEDAKLQLSKDTYDDDLDNLLAQIGDQYADLFLAAKNLSDAILLSDILRVNTEITKAPLSASMIKRYDEHHQDLTLLKALVRQQLPEKYKEIFFDQSKNGYAGYIDGGASQEEFYKFIKPILEKMDGTEELLVKLNREDLLRKQRTFDNGSIPHQIHLGELHAILRRQEDFYPFLKDNREKIEKILTFRIPYYVGPLARGNSRFAWMTRKSEETITPWNFEEVVDKGASAQSFIERMTNFDKNLPNEKVLPKHSLLYEYFTVYNELTKVKYVTEGMRKPAFLSGEQKKAIVDLLFKTNRKVTVKQLKEDYFKKIECFDSVEISGVEDRFNASLGTYHDLLKIIKDKDFLDNEENEDILEDIVLTLTLFEDREMIEERLKTYAHLFDDKVMKQLKRRRYTGWGRLSRKLINGIRDKQSGKTILDFLKSDGFANRNFMQLIHDDSLTFKEDIQKAQVSGQGDSLHEHIANLAGSPAIKKGILQTVKVVDELVKVMGRHKPENIVIEMARENQTTQKGQKNSRERMKRIEEGIKELGSQILKEHPVENTQLQNEKLYLYYLQNGRDMYVDQELDINRLSDYDVDHIVPQSFLKDDSIDNKVLTRSDKARGKSDNVPSEEVVKKMKNYWRQLLNAKLITQRKFDNLTKAERGGLSELDKAGFIKRQLVETRQITKHVAQILDSRMNTKYDENDKLIREVKVITLKSKLVSDFRKDFQFYKVREINNYHHAHDAYLNAVVGTALIKKYPKLESEFVYGDYKVYDVRKMIAKSEQEIGKATAKYFFYSNIMNFFKTEITLANGEIRKRPLIETNGETGEIVWDKGRDFATVRKVLSMPQVNIVKKTEVQTGGFSKESILPKRNSDKLIARKKDWDPKKYGGFDSPTVAYSVLVVAKVEKGKSKKLKSVKELLGITIMERSSFEKNPIDFLEAKGYKEVKKDLIIKLPKYSLFELENGRKRMLASAGELQKGNELALPSKYVNFLYLASHYEKLKGSPEDNEQKQLFVEQHKHYLDEIIEQISEFSKRVILADANLDKVLSAYNKHRDKPIREQAENIIHLFTLTNLGAPAAFKYFDTTIDRKRYTSTKEVLDATLIHQSITGLYETRIDLSQLGGDGGGSSEAAAKGGSGGVLNLEEEYRLHEKPVPSSIDPSWLQLFPTVWAERAGMGLANQVPPVVVELRSGASPVAVRQYPMSKEAREGIRPHIQRFLDLGVLVPCQSPWNTPLLPVKKPGTNDYRPVQDLREINKRVQDIHPTVPNPYNLLSSLPPSHTWYSVLDLKDAFFCLKLHPNSQPLFAFEWRDPEKGNTGQLTWTRLPQGFKNSPTLFNEALHRDLAPFRALNPQVVLLQYVDDLLVAAPTYRDCKEGTQKLLQELSKLGYRVSAKKAQLCQKEVTYLGYLLKEGKRWLTPARKATVMKIPPPTTPRQVREFLGKAGFCRLFIPGFASLAAPLYPLTKPSIPFIWTEEHQKAFDRIKEALLSAPALALPDLTKPFTLYVDERAGVARGVLTQTLGPWRRPVAYLSKKLDPVASGWPTCLKAVAAVALLLKDADKLTLGQNVTVIASHSLESIVRQPPDRWMTNARMTHYQSLLLNERVSFAPPAVLNPATLLPVESEATPVHRCSEILAEETGTRRDLKDQPLPGVPAWYTDGSSFIAEGKRRAGAAIVDGKRTVWASSLPEGTSAQKAELVALTQALRLAEGKDINIYTDSRYAFATAHIHGAIYKQRGWLTSAGKDIKNKEEILALLEAIHLPKRVAIIHCPGHQKGNDPVATGNRRADEAAKQAALSTRVLAETTKPAGKRTADGSEFEKRTADGSEFESPKKKAKVE

SEQ ID NO: 7094 - protein, 2096 aa, synthetic construct
MPAAKRVKLDGGDKKYSIGLDIGTNSVGWAVITDEYKVPSKKFKVLGNTDRHSIKKNLIGALLFDSGETAEATRLKRTARRRYTRRKNRICYLQEIFSNEMAKVDDSFFHRLEESFLVEEDKKHERHPIFGNIVDEVAYHEKYPTIYHLRKKLVDSTDKADLRLIYLALAHMIKFRGHFLIEGDLNPDNSDVDKLFIQLVQTYNQLFEENPINASGVDAKAILSARLSKSRRLENLIAQLPGEKKNGLFGNLIALSLGLTPNFKSNFDLAEDAKLQLSKDTYDDDLDNLLAQIGDQYADLFLAAKNLSDAILLSDILRVNTEITKAPLSASMIKRYDEHHQDLTLLKALVRQQLPEKYKEIFFDQSKNGYAGYIDGGASQEEFYKFIKPILEKMDGTEELLVKLNREDLLRKQRTFDNGSIPHQIHLGELHAILRRQEDFYPFLKDNREKIEKILTFRIPYYVGPLARGNSRFAWMTRKSEETITPWNFEEVVDKGASAQSFIERMTNFDKNLPNEKVLPKHSLLYEYFTVYNELTKVKYVTEGMRKPAFLSGEQKKAIVDLLFKTNRKVTVKQLKEDYFKKIECFDSVEISGVEDRFNASLGTYHDLLKIIKDKDFLDNEENEDILEDIVLTLTLFEDREMIEERLKTYAHLFDDKVMKQLKRRRYTGWGRLSRKLINGIRDKQSGKTILDFLKSDGFANRNFMQLIHDDSLTFKEDIQKAQVSGQGDSLHEHIANLAGSPAIKKGILQTVKVVDELVKVMGRHKPENIVIEMARENQTTQKGQKNSRERMKRIEEGIKELGSQILKEHPVENTQLQNEKLYLYYLQNGRDMYVDQELDINRLSDYDVDHIVPQSFLKDDSIDNKVLTRSDKARGKSDNVPSEEVVKKMKNYWRQLLNAKLITQRKFDNLTKAERGGLSELDKAGFIKRQLVETRQITKHVAQILDSRMNTKYDENDKLIREVKVITLKSKLVSDFRKDFQFYKVREINNYHHAHDAYLNAVVGTALIKKYPKLESEFVYGDYKVYDVRKMIAKSEQEIGKATAKYFFYSNIMNFFKTEITLANGEIRKRPLIETNGETGEIVWDKGRDFATVRKVLSMPQVNIVKKTEVQTGGFSKESILPKRNSDKLIARKKDWDPKKYGGFDSPTVAYSVLVVAKVEKGKSKKLKSVKELLGITIMERSSFEKNPIDFLEAKGYKEVKKDLIIKLPKYSLFELENGRKRMLASAGELQKGNELALPSKYVNFLYLASHYEKLKGSPEDNEQKQLFVEQHKHYLDEIIEQISEFSKRVILADANLDKVLSAYNKHRDKPIREQAENIIHLFTLTNLGAPAAFKYFDTTIDRKRYTSTKEVLDATLIHQSITGLYETRIDLSQLGGDGGGSSEAAAKGGSGGTLNIEDEYRLHETSKEPDVPLGSTWLSDFPQAWAETGGMGLAVRQAPLIIPLKATSTPVSIKQYPMSQEARLGIKPHIQRLLDQGILVPCQSPWNTPLLPVKKPGTNDYRPVQDLREVNKRVEDIHPTVPNPYNLLSGLPPSHQWYTVLDLKDAFFCLRLHPTSQPLFAFEWRDPEMGISGQLTWTRLPQGFKNSPTLFDEALHRDLADFRIQHPDLILLQYVDDLLLAATSEQDCQRGTRALLQTLGNLGYRASAKKAQICQKQVKYLGYLLKEGQRWLTEARKETVMGQPTPKTPRQLREFLGTAGFCRLWIPGFAEMAAPLYPLTKTGTLFNWGPDQQKAYQEIKQALLTAPALGLPDLTKPFELFVDEKQGYAKGVLTQKLGPWRRPVAYLSKKLDPVAAGWPPCLRMVAAIAVLTKDAGKLTMGQPLVILAPHAVEALVKQPPDRWLSNARMTHYQAMLLDTDRVQFGPVVALNPATLLPLPEKEAPHDCLEILAETHGTRPDLTDQPIPDADYTWYTDGSSFLQEGQRRAGAAVTTETEVIWARALPAGTSAQRAELIALTQALKMAEGKKLNVYTDSRYAFATAHVHGEIYRRRGLLTSEGREIKNKNEILALLKALFLPKRLSIIHCPGHQKGNSAEARGNRMADQAAREAAMKAVLETSTLLAGKRTADGSEFEKRTADGSEFESPKKKAKVE

SEQ ID NO: 7095 - protein, 2096 aa, synthetic construct
MPAAKRVKLDGGDKKYSIGLDIGTNSVGWAVITDEYKVPSKKFKVLGNTDRHSIKKNLIGALLFDSGETAEATRLKRTARRRYTRRKNRICYLQEIFSNEMAKVDDSFFHRLEESFLVEEDKKHERHPIFGNIVDEVAYHEKYPTIYHLRKKLVDSTDKADLRLIYLALAHMIKFRGHFLIEGDLNPDNSDVDKLFIQLVQTYNQLFEENPINASGVDAKAILSARLSKSRRLENLIAQLPGEKKNGLFGNLIALSLGLTPNFKSNFDLAEDAKLQLSKDTYDDDLDNLLAQIGDQYADLFLAAKNLSDAILLSDILRVNTEITKAPLSASMIKRYDEHHQDLTLLKALVRQQLPEKYKEIFFDQSKNGYAGYIDGGASQEEFYKFIKPILEKMDGTEELLVKLNREDLLRKQRTFDNGSIPHQIHLGELHAILRRQEDFYPFLKDNREKIEKILTFRIPYYVGPLARGNSRFAWMTRKSEETITPWNFEEVVDKGASAQSFIERMTNFDKNLPNEKVLPKHSLLYEYFTVYNELTKVKYVTEGMRKPAFLSGEQKKAIVDLLFKTNRKVTVKQLKEDYFKKIECFDSVEISGVEDRFNASLGTYHDLLKIIKDKDFLDNEENEDILEDIVLTLTLFEDREMIEERLKTYAHLFDDKVMKQLKRRRYTGWGRLSRKLINGIRDKQSGKTILDFLKSDGFANRNFMQLIHDDSLTFKEDIQKAQVSGQGDSLHEHIANLAGSPAIKKGILQTVKVVDELVKVMGRHKPENIVIEMARENQTTQKGQKNSRERMKRIEEGIKELGSQILKEHPVENTQLQNEKLYLYYLQNGRDMYVDQELDINRLSDYDVDHIVPQSFLKDDSIDNKVLTRSDKARGKSDNVPSEEVVKKMKNYWRQLLNAKLITQRKFDNLTKAERGGLSELDKAGFIKRQLVETRQITKHVAQILDSRMNTKYDENDKLIREVKVITLKSKLVSDFRKDFQFYKVREINNYHHAHDAYLNAVVGTALIKKYPKLESEFVYGDYKVYDVRKMIAKSEQEIGKATAKYFFYSNIMNFFKTEITLANGEIRKRPLIETNGETGEIVWDKGRDFATVRKVLSMPQVNIVKKTEVQTGGFSKESILPKRNSDKLIARKKDWDPKKYGGFDSPTVAYSVLVVAKVEKGKSKKLKSVKELLGITIMERSSFEKNPIDFLEAKGYKEVKKDLIIKLPKYSLFELENGRKRMLASAGELQKGNELALPSKYVNFLYLASHYEKLKGSPEDNEQKQLFVEQHKHYLDEIIEQISEFSKRVILADANLDKVLSAYNKHRDKPIREQAENIIHLFTLTNLGAPAAFKYFDTTIDRKRYTSTKEVLDATLIHQSITGLYETRIDLSQLGGDGGGSSEAAAKGGSGGTLNIEDEYRLHETSKEPDVPLGSTWLSDFPQAWAETGGMGLAVRQAPLIIPLKATSTPVSIKQYPMSQEARLGIKPHIQRLLDQGILVPCQSPWNTPLLPVKKPGTNDYRPVQDLREVNKRVEDIHPTVPNPYNLLSGLPPSHQWYTVLDLKDAFFCLRLHPTSQPLFAFEWRDPEMGISGQLTWTRLPQGFKNSPTLFNEALHRDLADFRIQHPDLILLQYVDDLLLAATSEQDCQRGTRALLQTLGNLGYRASAKKAQICQKQVKYLGYLLKEGQRWLTEARKETVMGQPTPKTPRQLREFLGTAGFCRLWIPGFAEMAAPLYPLTKPGTLFNWGPDQQKAYQEIKQALLTAPALGLPDLTKPFELFVDEKQGYAKGVLTQKLGPWRRPVAYLSKKLDPVAAGWPPCLRMVAAIAVLTKDAGKLTMGQPLVILAPHAVEALVKQPPDRWLSNARMTHYQAMLLDTDRVQFGPVVALNPATLLPLPEKEAPHDCLEILAETHGTRPDLTDQPIPDADYTWYTDGSSFLQEGQRRAGAAVTTETEVIWARALPAGTSAQRAELIALTQALKMAEGKKLNVYTDSRYAFATAHVHGEIYRRRGWLTSEGREIKNKNEILALLKALFLPKRLSIIHCPGHQKGNSAEARGNRMADQAAREAAMKAVLETSTLLAGKRTADGSEFEKRTADGSEFESPKKKAKVE

SEQ ID NO: 7096 - protein, 2098 aa, synthetic construct
MPAAKRVKLDGGDKKYSIGLDIGTNSVGWAVITDEYKVPSKKFKVLGNTDRHSIKKNLIGALLFDSGETAEATRLKRTARRRYTRRKNRICYLQEIFSNEMAKVDDSFFHRLEESFLVEEDKKHERHPIFGNIVDEVAYHEKYPTIYHLRKKLVDSTDKADLRLIYLALAHMIKFRGHFLIEGDLNPDNSDVDKLFIQLVQTYNQLFEENPINASGVDAKAILSARLSKSRRLENLIAQLPGEKKNGLFGNLIALSLGLTPNFKSNFDLAEDAKLQLSKDTYDDDLDNLLAQIGDQYADLFLAAKNLSDAILLSDILRVNTEITKAPLSASMIKRYDEHHQDLTLLKALVRQQLPEKYKEIFFDQSKNGYAGYIDGGASQEEFYKFIKPILEKMDGTEELLVKLNREDLLRKQRTFDNGSIPHQIHLGELHAILRRQEDFYPFLKDNREKIEKILTFRIPYYVGPLARGNSRFAWMTRKSEETITPWNFEEVVDKGASAQSFIERMTNFDKNLPNEKVLPKHSLLYEYFTVYNELTKVKYVTEGMRKPAFLSGEQKKAIVDLLFKTNRKVTVKQLKEDYFKKIECFDSVEISGVEDRFNASLGTYHDLLKIIKDKDFLDNEENEDILEDIVLTLTLFEDREMIEERLKTYAHLFDDKVMKQLKRRRYTGWGRLSRKLINGIRDKQSGKTILDFLKSDGFANRNFMQLIHDDSLTFKEDIQKAQVSGQGDSLHEHIANLAGSPAIKKGILQTVKVVDELVKVMGRHKPENIVIEMARENQTTQKGQKNSRERMKRIEEGIKELGSQILKEHPVENTQLQNEKLYLYYLQNGRDMYVDQELDINRLSDYDVDHIVPQSFLKDDSIDNKVLTRSDKARGKSDNVPSEEVVKKMKNYWRQLLNAKLITQRKFDNLTKAERGGLSELDKAGFIKRQLVETRQITKHVAQILDSRMNTKYDENDKLIREVKVITLKSKLVSDFRKDFQFYKVREINNYHHAHDAYLNAVVGTALIKKYPKLESEFVYGDYKVYDVRKMIAKSEQEIGKATAKYFFYSNIMNFFKTEITLANGEIRKRPLIETNGETGEIVWDKGRDFATVRKVLSMPQVNIVKKTEVQTGGFSKESILPKRNSDKLIARKKDWDPKKYGGFDSPTVAYSVLVVAKVEKGKSKKLKSVKELLGITIMERSSFEKNPIDFLEAKGYKEVKKDLIIKLPKYSLFELENGRKRMLASAGELQKGNELALPSKYVNFLYLASHYEKLKGSPEDNEQKQLFVEQHKHYLDEIIEQISEFSKRVILADANLDKVLSAYNKHRDKPIREQAENIIHLFTLTNLGAPAAFKYFDTTIDRKRYTSTKEVLDATLIHQSITGLYETRIDLSQLGGDGGEAAAKGGSGSSGGTAPLEEEYRLFLEAPIQNVTLLEQWKREIPKVWAEINPPGLASTQAPIHVQLLSTALPVRVRQYPITLEAKRSLRETIRKFRAAGILRPVHSPWNTPLLPVRKSGTSEYRMVQDLREVNKRVETIHPTVPNPYTLLSLLPPDRIWYSVLDLKDAFFCIPLAPESQLIFAFEWADAEEGESGQLTWTRLPQGFKNSPTLFNEALNRDLQGFRLDHPSVSLLQYVDDLLIAADTQAACLSATRDLLMTLAELGYRVSGKKAQLCQEEVTYLGFKIHKGSRSLSNSRTQAILQIPVPKTKRQVREFLGTIGYCRLWIPGFAELAQPLYAATRPGNDPLVWGEKEEEAFQSLKLALTQPPALALPSLDKPFQLFVEETSGAAKGVLTQALGPWKRPVAYLSKRLDPVAAGWPRCLRAIAAAALLTREASKLTFGQDIEITSSHNLESLLRSPPDKWLTNARITQYQVLLLDPPRVRFKQTAALNPATLLPETDDTLPIHHCLDTLDSLTSTRPDLTDQPLAQAEATLFTDGSSYIRDGKRYAGAAVVTLDSVIWAEPLPIGTSAQKAELIALTKALEWSKDKSVNIYTDSRYAFATLHVHGMIYRERGWLTAGGKAIKNAPEILALLTAVWLPKRVAVMHCKGHQKDDAPTSTGNRRADEVAREVAIRPLSTQATISAGKRTADGSEFEKRTADGSEFESPKKKAKVE

SEQ ID NO: 7097 - protein, 2102 aa, synthetic construct
MPAAKRVKLDGGDKKYSIGLDIGTNSVGWAVITDEYKVPSKKFKVLGNTDRHSIKKNLIGALLFDSGETAEATRLKRTARRRYTRRKNRICYLQEIFSNEMAKVDDSFFHRLEESFLVEEDKKHERHPIFGNIVDEVAYHEKYPTIYHLRKKLVDSTDKADLRLIYLALAHMIKFRGHFLIEGDLNPDNSDVDKLFIQLVQTYNQLFEENPINASGVDAKAILSARLSKSRRLENLIAQLPGEKKNGLFGNLIALSLGLTPNFKSNFDLAEDAKLQLSKDTYDDDLDNLLAQIGDQYADLFLAAKNLSDAILLSDILRVNTEITKAPLSASMIKRYDEHHQDLTLLKALVRQQLPEKYKEIFFDQSKNGYAGYIDGGASQEEFYKFIKPILEKMDGTEELLVKLNREDLLRKQRTFDNGSIPHQIHLGELHAILRRQEDFYPFLKDNREKIEKILTFRIPYYVGPLARGNSRFAWMTRKSEETITPWNFEEVVDKGASAQSFIERMTNFDKNLPNEKVLPKHSLLYEYFTVYNELTKVKYVTEGMRKPAFLSGEQKKAIVDLLFKTNRKVTVKQLKEDYFKKIECFDSVEISGVEDRFNASLGTYHDLLKIIKDKDFLDNEENEDILEDIVLTLTLFEDREMIEERLKTYAHLFDDKVMKQLKRRRYTGWGRLSRKLINGIRDKQSGKTILDFLKSDGFANRNFMQLIHDDSLTFKEDIQKAQVSGQGDSLHEHIANLAGSPAIKKGILQTVKVVDELVKVMGRHKPENIVIEMARENQTTQKGQKNSRERMKRIEEGIKELGSQILKEHPVENTQLQNEKLYLYYLQNGRDMYVDQELDINRLSDYDVDHIVPQSFLKDDSIDNKVLTRSDKARGKSDNVPSEEVVKKMKNYWRQLLNAKLITQRKFDNLTKAERGGLSELDKAGFIKRQLVETRQITKHVAQILDSRMNTKYDENDKLIREVKVITLKSKLVSDFRKDFQFYKVREINNYHHAHDAYLNAVVGTALIKKYPKLESEFVYGDYKVYDVRKMIAKSEQEIGKATAKYFFYSNIMNFFKTEITLANGEIRKRPLIETNGETGEIVWDKGRDFATVRKVLSMPQVNIVKKTEVQTGGFSKESILPKRNSDKLIARKKDWDPKKYGGFDSPTVAYSVLVVAKVEKGKSKKLKSVKELLGITIMERSSFEKNPIDFLEAKGYKEVKKDLIIKLPKYSLFELENGRKRMLASAGELQKGNELALPSKYVNFLYLASHYEKLKGSPEDNEQKQLFVEQHKHYLDEIIEQISEFSKRVILADANLDKVLSAYNKHRDKPIREQAENIIHLFTLTNLGAPAAFKYFDTTIDRKRYTSTKEVLDATLIHQSITGLYETRIDLSQLGGDGGEAAAKGGSGSSGGTVSLQDEHRLFDIPVTTSLPDVWLQDFPQAWAETGGLGRAKCQAPIIIDLKPTAVPVSIKQYPMSLEAHMGIRQHIIKFLELGVLRPCRSPWNTPLLPVKKPGTQDYRPVQDLREINKRTVDIHPTVPNPYNLLSTLKPDYSWYTVLDLKDAFFCLPLAPQSQELFAFEWKDPERGISGQLTWTRLPQGFKNSPTLFNEALHRDLTDFRTQHPEVTLLQYVDDLLLAAPTKKACTQGTRHLLQELGEKGYRASAKKAQICQTKVTYLGYILSEGKRWLTPGRIETVARIPPPRNPREVREFLGTAGFCRLWIPGFAELAAPLYALTKPSTPFTWQTEHQLAFEALKKALLSAPALGLPDTSKPFTLFLDERQGIAKGVLTQKLGPWKRPVAYLSKKLDPVAAGWPPCLRIMAATAMLVKDSAKLTLGQPLTVITPHTLEAIVRQPPDRWITNARLTHYQALLLDTDRVQFGPPVTLNPATLLPVPENQPSPHDCRQVLAETHGTREDLKDQELPDADHTWYTDGSSYLDSGTRRAGAAVVDGHNTIWAQSLPPGTSAQKAELIALTKALELSKGKKANIYTDSRYAFATAHTHGSIYERRGWLTSEGKEIKNKAEIIALLKALFLPQEVAIIHCPGHQKGQDPVAVGNRQADRVARQAAMAEVLTLATEPDNTSHITAGKRTADGSEFEKRTADGSEFESPKKKAKVE

SEQ ID NO: 7098 - protein, 2218 aa, synthetic construct
MPAAKRVKLDGGDKKYSIGLDIGTNSVGWAVITDEYKVPSKKFKVLGNTDRHSIKKNLIGALLFDSGETAEATRLKRTARRRYTRRKNRICYLQEIFSNEMAKVDDSFFHRLEESFLVEEDKKHERHPIFGNIVDEVAYHEKYPTIYHLRKKLVDSTDKADLRLIYLALAHMIKFRGHFLIEGDLNPDNSDVDKLFIQLVQTYNQLFEENPINASGVDAKAILSARLSKSRRLENLIAQLPGEKKNGLFGNLIALSLGLTPNFKSNFDLAEDAKLQLSKDTYDDDLDNLLAQIGDQYADLFLAAKNLSDAILLSDILRVNTEITKAPLSASMIKRYDEHHQDLTLLKALVRQQLPEKYKEIFFDQSKNGYAGYIDGGASQEEFYKFIKPILEKMDGTEELLVKLNREDLLRKQRTFDNGSIPHQIHLGELHAILRRQEDFYPFLKDNREKIEKILTFRIPYYVGPLARGNSRFAWMTRKSEETITPWNFEEVVDKGASAQSFIERMTNFDKNLPNEKVLPKHSLLYEYFTVYNELTKVKYVTEGMRKPAFLSGEQKKAIVDLLFKTNRKVTVKQLKEDYFKKIECFDSVEISGVEDRFNASLGTYHDLLKIIKDKDFLDNEENEDILEDIVLTLTLFEDREMIEERLKTYAHLFDDKVMKQLKRRRYTGWGRLSRKLINGIRDKQSGKTILDFLKSDGFANRNFMQLIHDDSLTFKEDIQKAQVSGQGDSLHEHIANLAGSPAIKKGILQTVKVVDELVKVMGRHKPENIVIEMARENQTTQKGQKNSRERMKRIEEGIKELGSQILKEHPVENTQLQNEKLYLYYLQNGRDMYVDQELDINRLSDYDVDHIVPQSFLKDDSIDNKVLTRSDKARGKSDNVPSEEVVKKMKNYWRQLLNAKLITQRKFDNLTKAERGGLSELDKAGFIKRQLVETRQITKHVAQILDSRMNTKYDENDKLIREVKVITLKSKLVSDFRKDFQFYKVREINNYHHAHDAYLNAVVGTALIKKYPKLESEFVYGDYKVYDVRKMIAKSEQEIGKATAKYFFYSNIMNFFKTEITLANGEIRKRPLIETNGETGEIVWDKGRDFATVRKVLSMPQVNIVKKTEVQTGGFSKESILPKRNSDKLIARKKDWDPKKYGGFDSPTVAYSVLVVAKVEKGKSKKLKSVKELLGITIMERSSFEKNPIDFLEAKGYKEVKKDLIIKLPKYSLFELENGRKRMLASAGELQKGNELALPSKYVNFLYLASHYEKLKGSPEDNEQKQLFVEQHKHYLDEIIEQISEFSKRVILADANLDKVLSAYNKHRDKPIREQAENIIHLFTLTNLGAPAAFKYFDTTIDRKRYTSTKEVLDATLIHQSITGLYETRIDLSQLGGDGGEAAAKGGSGSSGGTLGDQGSRGSDPLPEPRVTLTVEGIPTEFLVNTGAEHSVLTKPMGKMGSKRTVVAGATGSKVYPWTTKRLLKIGQKQVTHSFLVIPECPAPLLGRDLLTKLKAQIQFSTEGPQVTWEDRPAMCLVLNLEEEYRLHEKPVPPSIDPSWLQLFPMVWAEKAGMGLANQVPPVVVELKSDASPVAVRQYPMSKEAREGIRPHIQRFLDLGILVPCQSPWNTPLLPVKKPGTNDYRPVQDLREVNKRVQDIHPTVPNPYNLLSSLPPSHTWYSVLDLKDAFFCLKLHPNSQPLFAFEWRDPEKGNTGQLTWTRLPQGFKNSPTLFNEALHRDLASFRALNPQVVMLQYVDDLLVAAPTYRDCKEGTRRLLQELSKLGYRVSAKKAQLCREEVTYLGYLLKGGKRWLTPARKATVMKIPTPTTPRQVREFLGTAGFCRLWIPGFASLAAPLYPLTRPKVPFTWTEAHQEAFGRIKEALLSAPALALPDLTKPFALYVDEKEGVARGVLTQTLGPWRRPVAYLSKKLDPVASGWPTCLKAIAAVALLLKDADKLTLGQNVLVIAPHNLESIVRQPPDRWMTNARMTHYQSLLLNERVSFAPPAILNPATLLPVESDDTPIHICSEILAEETGTRPDLRDQPLPGVPAWYTDGSSFIMDGRRQAGAAIVDNKRTVWASNLPEGTSAQKAELIALTQALRLAEGKSINIYTDSRYAFATAHVHGAIYKQRGWLTSAGKDIKNKEEILALLEAIHLPKRVAIIHCPGHQRGTDPVATGNRKADEAAKQAAQSTRILTETTKNAGKRTADGSEFEKRTADGSEFESPKKKAKVE

SEQ ID NO: 7099 - protein, 2218 aa, synthetic construct
MPAAKRVKLDGGDKKYSIGLDIGTNSVGWAVITDEYKVPSKKFKVLGNTDRHSIKKNLIGALLFDSGETAEATRLKRTARRRYTRRKNRICYLQEIFSNEMAKVDDSFFHRLEESFLVEEDKKHERHPIFGNIVDEVAYHEKYPTIYHLRKKLVDSTDKADLRLIYLALAHMIKFRGHFLIEGDLNPDNSDVDKLFIQLVQTYNQLFEENPINASGVDAKAILSARLSKSRRLENLIAQLPGEKKNGLFGNLIALSLGLTPNFKSNFDLAEDAKLQLSKDTYDDDLDNLLAQIGDQYADLFLAAKNLSDAILLSDILRVNTEITKAPLSASMIKRYDEHHQDLTLLKALVRQQLPEKYKEIFFDQSKNGYAGYIDGGASQEEFYKFIKPILEKMDGTEELLVKLNREDLLRKQRTFDNGSIPHQIHLGELHAILRRQEDFYPFLKDNREKIEKILTFRIPYYVGPLARGNSRFAWMTRKSEETITPWNFEEVVDKGASAQSFIERMTNFDKNLPNEKVLPKHSLLYEYFTVYNELTKVKYVTEGMRKPAFLSGEQKKAIVDLLFKTNRKVTVKQLKEDYFKKIECFDSVEISGVEDRFNASLGTYHDLLKIIKDKDFLDNEENEDILEDIVLTLTLFEDREMIEERLKTYAHLFDDKVMKQLKRRRYTGWGRLSRKLINGIRDKQSGKTILDFLKSDGFANRNFMQLIHDDSLTFKEDIQKAQVSGQGDSLHEHIANLAGSPAIKKGILQTVKVVDELVKVMGRHKPENIVIEMARENQTTQKGQKNSRERMKRIEEGIKELGSQILKEHPVENTQLQNEKLYLYYLQNGRDMYVDQELDINRLSDYDVDHIVPQSFLKDDSIDNKVLTRSDKARGKSDNVPSEEVVKKMKNYWRQLLNAKLITQRKFDNLTKAERGGLSELDKAGFIKRQLVETRQITKHVAQILDSRMNTKYDENDKLIREVKVITLKSKLVSDFRKDFQFYKVREINNYHHAHDAYLNAVVGTALIKKYPKLESEFVYGDYKVYDVRKMIAKSEQEIGKATAKYFFYSNIMNFFKTEITLANGEIRKRPLIETNGETGEIVWDKGRDFATVRKVLSMPQVNIVKKTEVQTGGFSKESILPKRNSDKLIARKKDWDPKKYGGFDSPTVAYSVLVVAKVEKGKSKKLKSVKELLGITIMERSSFEKNPIDFLEAKGYKEVKKDLIIKLPKYSLFELENGRKRMLASAGELQKGNELALPSKYVNFLYLASHYEKLKGSPEDNEQKQLFVEQHKHYLDEIIEQISEFSKRVILADANLDKVLSAYNKHRDKPIREQAENIIHLFTLTNLGAPAAFKYFDTTIDRKRYTSTKEVLDATLIHQSITGLYETRIDLSQLGGDGGEAAAKGGSGSSGGTLGDQGSRGSDPLPEPRVTLTVEGIPTEFLVNTGAEHSVLTKPMGKMGSKRTVVAGATGSKVYPWTTKRLLKIGQKQVTHSFLVIPECPAPLLGRDLLTKLKAQIQFSTEGPQVTWEDRPAMCLVLNLEEEYRLHEKPVPPSIDPSWLQLFPMVWAEKAGMGLANQVPPVVVELKSDASPVAVRQYPMSKEAREGIRPHIQRFLDLGILVPCQSPWNTPLLPVKKPGTNDYRPVQDLREVNKRVQDIHPTVPNPYNLLSSLPPSHTWYSVLDLKDAFFCLKLHPNSQPLFAFEWRDPEKGNTGQLTWTRLPQGFKNSPTLFNEALHRDLASFRALNPQVVMLQYVDDLLVAAPTYRDCKEGTRRLLQELSKLGYRVSAKKAQLCREEVTYLGYLLKGGKRWLTPARKATVMKIPTPTTPRQVREFLGKAGFCRLFIPGFASLAAPLYPLTRPKVPFTWTEAHQEAFGRIKEALLSAPALALPDLTKPFALYVDEKEGVARGVLTQTLGPWRRPVAYLSKKLDPVASGWPTCLKAIAAVALLLKDADKLTLGQNVLVIAPHNLESIVRQPPDRWMTNARMTHYQSLLLNERVSFAPPAILNPATLLPVESDDTPIHICSEILAEETGTRPDLRDQPLPGVPAWYTDGSSFIMDGRRQAGAAIVDNKRTVWASNLPEGTSAQKAELIALTQALRLAEGKSINIYTDSRYAFATAHVHGAIYKQRGWLTSAGKDIKNKEEILALLEAIHLPKRVAIIHCPGHQRGTDPVATGNRKADEAAKQAAQSTRILTETTKNAGKRTADGSEFEKRTADGSEFESPKKKAKVE

SEQ ID NO: 7100 - protein, 2096 aa, synthetic construct
MPAAKRVKLDGGDKKYSIGLDIGTNSVGWAVITDEYKVPSKKFKVLGNTDRHSIKKNLIGALLFDSGETAEATRLKRTARRRYTRRKNRICYLQEIFSNEMAKVDDSFFHRLEESFLVEEDKKHERHPIFGNIVDEVAYHEKYPTIYHLRKKLVDSTDKADLRLIYLALAHMIKFRGHFLIEGDLNPDNSDVDKLFIQLVQTYNQLFEENPINASGVDAKAILSARLSKSRRLENLIAQLPGEKKNGLFGNLIALSLGLTPNFKSNFDLAEDAKLQLSKDTYDDDLDNLLAQIGDQYADLFLAAKNLSDAILLSDILRVNTEITKAPLSASMIKRYDEHHQDLTLLKALVRQQLPEKYKEIFFDQSKNGYAGYIDGGASQEEFYKFIKPILEKMDGTEELLVKLNREDLLRKQRTFDNGSIPHQIHLGELHAILRRQEDFYPFLKDNREKIEKILTFRIPYYVGPLARGNSRFAWMTRKSEETITPWNFEEVVDKGASAQSFIERMTNFDKNLPNEKVLPKHSLLYEYFTVYNELTKVKYVTEGMRKPAFLSGEQKKAIVDLLFKTNRKVTVKQLKEDYFKKIECFDSVEISGVEDRFNASLGTYHDLLKIIKDKDFLDNEENEDILEDIVLTLTLFEDREMIEERLKTYAHLFDDKVMKQLKRRRYTGWGRLSRKLINGIRDKQSGKTILDFLKSDGFANRNFMQLIHDDSLTFKEDIQKAQVSGQGDSLHEHIANLAGSPAIKKGILQTVKVVDELVKVMGRHKPENIVIEMARENQTTQKGQKNSRERMKRIEEGIKELGSQILKEHPVENTQLQNEKLYLYYLQNGRDMYVDQELDINRLSDYDVDHIVPQSFLKDDSIDNKVLTRSDKARGKSDNVPSEEVVKKMKNYWRQLLNAKLITQRKFDNLTKAERGGLSELDKAGFIKRQLVETRQITKHVAQILDSRMNTKYDENDKLIREVKVITLKSKLVSDFRKDFQFYKVREINNYHHAHDAYLNAVVGTALIKKYPKLESEFVYGDYKVYDVRKMIAKSEQEIGKATAKYFFYSNIMNFFKTEITLANGEIRKRPLIETNGETGEIVWDKGRDFATVRKVLSMPQVNIVKKTEVQTGGFSKESILPKRNSDKLIARKKDWDPKKYGGFDSPTVAYSVLVVAKVEKGKSKKLKSVKELLGITIMERSSFEKNPIDFLEAKGYKEVKKDLIIKLPKYSLFELENGRKRMLASAGELQKGNELALPSKYVNFLYLASHYEKLKGSPEDNEQKQLFVEQHKHYLDEIIEQISEFSKRVILADANLDKVLSAYNKHRDKPIREQAENIIHLFTLTNLGAPAAFKYFDTTIDRKRYTSTKEVLDATLIHQSITGLYETRIDLSQLGGDGGEAAAKGGSGSSGGTLNLEDEYRLYETSAEPEVSPGSTWLSDFPQAWAETGGMGLAVRQAPLIIPLKATSTPVSIKQYPMSQEAKLGIKPHIQRLLDQGILVPCQSPWNTPLLPVKKPGTNDYRPVQDLREVNKRVEDIHPTVPNPYNLLSGLPPSHRWYTVLDLKDAFFCLRLHPTSQPLFAFEWRDPGMGISGQLTWTRLPQGFKNSPTLFNEALHRDLADFRIQHPDLILLQYVDDILLAATSELDCQQGTRALLLTLGNLGYRASAKKAQLCQKQVKYLGYLLKEGQRWLTEARKETVMGQPTPKTPRQLREFLGKAGFCRLFIPGFAEMAAPLYPLTKPGTLFNWGPDQQKAYQEIKQALLTAPALGLPDLTKPFELFVDEKQGYAKGVLTQKLGPWRRPVAYLSKKLDPVAAGWPPCLRMVAAIAVLRKDAGKLTMGQPLVILAPHAVEALVKQPPDRWLSNARMTHYQAMLLDTDRVQFGPVVALNPATLLPLPEEGAPHDCLEILAETHGTRPDLTDQPIPDADHTWYTDGSSFLQEGQRKAGAAVTTETEVIWARALPAGTSAQRAELIALTQALKMAEGKRLNVYTDSRYAFATAHIHGEIYRRRGWLTSEGREIKNKSEILALLKALFLPKRLSIIHCLGHQKGDSAEARGNRLADQAAREAAIKTPPDTSTLLAGKRTADGSEFEKRTADGSEFESPKKKAKVE

SEQ ID NO: 7101 - protein, 2096 aa, synthetic construct
MPAAKRVKLDGGDKKYSIGLDIGTNSVGWAVITDEYKVPSKKFKVLGNTDRHSIKKNLIGALLFDSGETAEATRLKRTARRRYTRRKNRICYLQEIFSNEMAKVDDSFFHRLEESFLVEEDKKHERHPIFGNIVDEVAYHEKYPTIYHLRKKLVDSTDKADLRLIYLALAHMIKFRGHFLIEGDLNPDNSDVDKLFIQLVQTYNQLFEENPINASGVDAKAILSARLSKSRRLENLIAQLPGEKKNGLFGNLIALSLGLTPNFKSNFDLAEDAKLQLSKDTYDDDLDNLLAQIGDQYADLFLAAKNLSDAILLSDILRVNTEITKAPLSASMIKRYDEHHQDLTLLKALVRQQLPEKYKEIFFDQSKNGYAGYIDGGASQEEFYKFIKPILEKMDGTEELLVKLNREDLLRKQRTFDNGSIPHQIHLGELHAILRRQEDFYPFLKDNREKIEKILTFRIPYYVGPLARGNSRFAWMTRKSEETITPWNFEEVVDKGASAQSFIERMTNFDKNLPNEKVLPKHSLLYEYFTVYNELTKVKYVTEGMRKPAFLSGEQKKAIVDLLFKTNRKVTVKQLKEDYFKKIECFDSVEISGVEDRFNASLGTYHDLLKIIKDKDFLDNEENEDILEDIVLTLTLFEDREMIEERLKTYAHLFDDKVMKQLKRRRYTGWGRLSRKLINGIRDKQSGKTILDFLKSDGFANRNFMQLIHDDSLTFKEDIQKAQVSGQGDSLHEHIANLAGSPAIKKGILQTVKVVDELVKVMGRHKPENIVIEMARENQTTQKGQKNSRERMKRIEEGIKELGSQILKEHPVENTQLQNEKLYLYYLQNGRDMYVDQELDINRLSDYDVDHIVPQSFLKDDSIDNKVLTRSDKARGKSDNVPSEEVVKKMKNYWRQLLNAKLITQRKFDNLTKAERGGLSELDKAGFIKRQLVETRQITKHVAQILDSRMNTKYDENDKLIREVKVITLKSKLVSDFRKDFQFYKVREINNYHHAHDAYLNAVVGTALIKKYPKLESEFVYGDYKVYDVRKMIAKSEQEIGKATAKYFFYSNIMNFFKTEITLANGEIRKRPLIETNGETGEIVWDKGRDFATVRKVLSMPQVNIVKKTEVQTGGFSKESILPKRNSDKLIARKKDWDPKKYGGFDSPTVAYSVLVVAKVEKGKSKKLKSVKELLGITIMERSSFEKNPIDFLEAKGYKEVKKDLIIKLPKYSLFELENGRKRMLASAGELQKGNELALPSKYVNFLYLASHYEKLKGSPEDNEQKQLFVEQHKHYLDEIIEQISEFSKRVILADANLDKVLSAYNKHRDKPIREQAENIIHLFTLTNLGAPAAFKYFDTTIDRKRYTSTKEVLDATLIHQSITGLYETRIDLSQLGGDGGEAAAKGGSGSSGGTLNIEDEYRLHETSKGPDVPLGSTWLSDFPQAWAETGGMGLAVRQAPLIIPLKATSTPVSIKQYPMSQEARLGIKPHIQRLLDQGILVPCQSPWNTPLLPVKKPGTNDYRPVQDLREVNKRVEDIHPTVPNPYNLLSGLPPSHQWYTVLDLKDAFFCLRLHPTSQSLFAFEWRDPEMGISGQLTWTRLPQGFKNSPTLFDEALHRDLADFRIQHPDLILLQYVDDLLLAATSELDCQQGTRALLQTLGDLGYRASAKKAQICQKQVKYLGYLLKEGQRWLTEARKETVMGQPTPKTPRQLREFLGTAGFCRLWIPGFAEMAAPLYPLTKTGTLFEWGPDQQKAYQEIKQALLTAPALGLPDLTKPFELFVDEKQGYAKGVLTQKLGPWRRPVAYLSKKLDPVAAGWPPCLRMVAAIAVLTKDAGKLTMGQPLVILAPHAVEALVKQPPDRWLSNARMTHYQALLLDTDRVQFGPIVALNPATLLPLPEEGLQHDCLDILAEAHGTRPDLTDQPLPDADHTWYTDGSSFLQEGQRKAGAAVTTETEVVWAKALPAGTSAQRAELIALTQALKMAEGKKLNVYTDSRYAFATAHIHGEIYRRRGLLTSEGKEIKNKDEILALLKALFLPKRLSIIHCPGHQKGNRAEARGNRMADQAAREVATRETPETSTLLAGKRTADGSEFEKRTADGSEFESPKKKAKVE

SEQ ID NO: 7102 - protein, 2087 aa, synthetic construct
MPAAKRVKLDGGDKKYSIGLDIGTNSVGWAVITDEYKVPSKKFKVLGNTDRHSIKKNLIGALLFDSGETAEATRLKRTARRRYTRRKNRICYLQEIFSNEMAKVDDSFFHRLEESFLVEEDKKHERHPIFGNIVDEVAYHEKYPTIYHLRKKLVDSTDKADLRLIYLALAHMIKFRGHFLIEGDLNPDNSDVDKLFIQLVQTYNQLFEENPINASGVDAKAILSARLSKSRRLENLIAQLPGEKKNGLFGNLIALSLGLTPNFKSNFDLAEDAKLQLSKDTYDDDLDNLLAQIGDQYADLFLAAKNLSDAILLSDILRVNTEITKAPLSASMIKRYDEHHQDLTLLKALVRQQLPEKYKEIFFDQSKNGYAGYIDGGASQEEFYKFIKPILEKMDGTEELLVKLNREDLLRKQRTFDNGSIPHQIHLGELHAILRRQEDFYPFLKDNREKIEKILTFRIPYYVGPLARGNSRFAWMTRKSEETITPWNFEEVVDKGASAQSFIERMTNFDKNLPNEKVLPKHSLLYEYFTVYNELTKVKYVTEGMRKPAFLSGEQKKAIVDLLFKTNRKVTVKQLKEDYFKKIECFDSVEISGVEDRFNASLGTYHDLLKIIKDKDFLDNEENEDILEDIVLTLTLFEDREMIEERLKTYAHLFDDKVMKQLKRRRYTGWGRLSRKLINGIRDKQSGKTILDFLKSDGFANRNFMQLIHDDSLTFKEDIQKAQVSGQGDSLHEHIANLAGSPAIKKGILQTVKVVDELVKVMGRHKPENIVIEMARENQTTQKGQKNSRERMKRIEEGIKELGSQILKEHPVENTQLQNEKLYLYYLQNGRDMYVDQELDINRLSDYDVDHIVPQSFLKDDSIDNKVLTRSDKARGKSDNVPSEEVVKKMKNYWRQLLNAKLITQRKFDNLTKAERGGLSELDKAGFIKRQLVETRQITKHVAQILDSRMNTKYDENDKLIREVKVITLKSKLVSDFRKDFQFYKVREINNYHHAHDAYLNAVVGTALIKKYPKLESEFVYGDYKVYDVRKMIAKSEQEIGKATAKYFFYSNIMNFFKTEITLANGEIRKRPLIETNGETGEIVWDKGRDFATVRKVLSMPQVNIVKKTEVQTGGFSKESILPKRNSDKLIARKKDWDPKKYGGFDSPTVAYSVLVVAKVEKGKSKKLKSVKELLGITIMERSSFEKNPIDFLEAKGYKEVKKDLIIKLPKYSLFELENGRKRMLASAGELQKGNELALPSKYVNFLYLASHYEKLKGSPEDNEQKQLFVEQHKHYLDEIIEQISEFSKRVILADANLDKVLSAYNKHRDKPIREQAENIIHLFTLTNLGAPAAFKYFDTTIDRKRYTSTKEVLDATLIHQSITGLYETRIDLSQLGGDGGEAAAKGGSGSSGGIPWLMKKPLQLTTLVPLQEYEERLLKQTMLTGSYKEKLQSLFLKYDALWQHWENQVGHRRIKPHHIATGTVNPRPQKQYPINPKAKASIQTVINDLLKQGVLIQQNSIMNTPVYPVPKPDGKWRMVLDYREVNKTIPLIAAQNQHSAGILSSIFRGKYKTTLDLSNGFWAHSITPESYWLTAFTWLGQQYCWTRLPQGFLNSPALFNADVVDLLKEVPNVQVYVDDIYISHDDPREHLEQLEKVFSLLLNAGYVVSLKKSEIAQHEVEFLGFNITKEGRGLTETFKQKLLNITPPRDLKQLQSILGLLNFARNFIPNFSELVKPLYNIIATAPGKYITWTTDNSQQLQNIISMLNSAENLEERNPEVRLIMKVNTSPSAGYIRFYNEFAKRPIMYLNYVYTKAEVKFTNTEKLLTTIHKGLIKALDLGMGQEILVYSPIVSMTKIQKTPLPERKALPIRWITWMSYLEDPRIQFHYDKTLPELQQVPTVTDDIIAKIKHPSEFSMVFYTDGSAIKHPNVNKSHNAGMGIAQVQFKPEFTVINTWSIPLGDHTAQLAEVAAVEFACKKALKIDGPVLIVTDSFYVAESVNKELPYWQSNGFFNNKKKPLKHVSKWKSIADCIQLKPDIIIIHEKGHQPTASTFHTEGNNLADKLATQGSYVVNAGKRTADGSEFEKRTADGSEFESPKKKAKVE

SEQ ID NO: 7103 - protein, 2096 aa, synthetic construct; identical to SEQ ID NO: 4523

SEQ ID NO: 7104 - protein, 2098 aa, synthetic construct
MPAAKRVKLDGGDKKYSIGLDIGTNSVGWAVITDEYKVPSKKFKVLGNTDRHSIKKNLIGALLFDSGETAEATRLKRTARRRYTRRKNRICYLQEIFSNEMAKVDDSFFHRLEESFLVEEDKKHERHPIFGNIVDEVAYHEKYPTIYHLRKKLVDSTDKADLRLIYLALAHMIKFRGHFLIEGDLNPDNSDVDKLFIQLVQTYNQLFEENPINASGVDAKAILSARLSKSRRLENLIAQLPGEKKNGLFGNLIALSLGLTPNFKSNFDLAEDAKLQLSKDTYDDDLDNLLAQIGDQYADLFLAAKNLSDAILLSDILRVNTEITKAPLSASMIKRYDEHHQDLTLLKALVRQQLPEKYKEIFFDQSKNGYAGYIDGGASQEEFYKFIKPILEKMDGTEELLVKLNREDLLRKQRTFDNGSIPHQIHLGELHAILRRQEDFYPFLKDNREKIEKILTFRIPYYVGPLARGNSRFAWMTRKSEETITPWNFEEVVDKGASAQSFIERMTNFDKNLPNEKVLPKHSLLYEYFTVYNELTKVKYVTEGMRKPAFLSGEQKKAIVDLLFKTNRKVTVKQLKEDYFKKIECFDSVEISGVEDRFNASLGTYHDLLKIIKDKDFLDNEENEDILEDIVLTLTLFEDREMIEERLKTYAHLFDDKVMKQLKRRRYTGWGRLSRKLINGIRDKQSGKTILDFLKSDGFANRNFMQLIHDDSLTFKEDIQKAQVSGQGDSLHEHIANLAGSPAIKKGILQTVKVVDELVKVMGRHKPENIVIEMARENQTTQKGQKNSRERMKRIEEGIKELGSQILKEHPVENTQLQNEKLYLYYLQNGRDMYVDQELDINRLSDYDVDHIVPQSFLKDDSIDNKVLTRSDKARGKSDNVPSEEVVKKMKNYWRQLLNAKLITQRKFDNLTKAERGGLSELDKAGFIKRQLVETRQITKHVAQILDSRMNTKYDENDKLIREVKVITLKSKLVSDFRKDFQFYKVREINNYHHAHDAYLNAVVGTALIKKYPKLESEFVYGDYKVYDVRKMIAKSEQEIGKATAKYFFYSNIMNFFKTEITLANGEIRKRPLIETNGETGEIVWDKGRDFATVRKVLSMPQVNIVKKTEVQTGGFSKESILPKRNSDKLIARKKDWDPKKYGGFDSPTVAYSVLVVAKVEKGKSKKLKSVKELLGITIMERSSFEKNPIDFLEAKGYKEVKKDLIIKLPKYSLFELENGRKRMLASAGELQKGNELALPSKYVNFLYLASHYEKLKGSPEDNEQKQLFVEQHKHYLDEIIEQISEFSKRVILADANLDKVLSAYNKHRDKPIREQAENIIHLFTLTNLGAPAAFKYFDTTIDRKRYTSTKEVLDATLIHQSITGLYETRIDLSQLGGDGGEAAAKGSSGGSGGTAPLEEEYRLFLEAPIQNVTLLEQWKREIPKVWAEINPPGLASTQAPIHVQLLSTALPVRVRQYPITLEAKRSLRETIRKFRAAGILRPVHSPWNTPLLPVRKSGTSEYRMVQDLREVNKRVETIHPTVPNPYTLLSLLPPDRIWYSVLDLKDAFFCIPLAPESQLIFAFEWADAEEGESGQLTWTRLPQGFKNSPTLFNEALNRDLQGFRLDHPSVSLLQYVDDLLIAADTQAACLSATRDLLMTLAELGYRVSGKKAQLCQEEVTYLGFKIHKGSRSLSNSRTQAILQIPVPKTKRQVREFLGTIGYCRLWIPGFAELAQPLYAATRPGNDPLVWGEKEEEAFQSLKLALTQPPALALPSLDKPFQLFVEETSGAAKGVLTQALGPWKRPVAYLSKRLDPVAAGWPRCLRAIAAAALLTREASKLTFGQDIEITSSHNLESLLRSPPDKWLTNARITQYQVLLLDPPRVRFKQTAALNPATLLPETDDTLPIHHCLDTLDSLTSTRPDLTDQPLAQAEATLFTDGSSYIRDGKRYAGAAVVTLDSVIWAEPLPIGTSAQKAELIALTKALEWSKDKSVNIYTDSRYAFATLHVHGMIYRERGWLTAGGKAIKNAPEILALLTAVWLPKRVAVMHCKGHQKDDAPTSTGNRRADEVAREVAIRPLSTQATISAGKRTADGSEFEKRTADGSEFESPKKKAKVE

SEQ ID NO: 7105 - protein, 2098 aa, synthetic construct
MPAAKRVKLDGGDKKYSIGLDIGTNSVGWAVITDEYKVPSKKFKVLGNTDRHSIKKNLIGALLFDSGETAEATRLKRTARRRYTRRKNRICYLQEIFSNEMAKVDDSFFHRLEESFLVEEDKKHERHPIFGNIVDEVAYHEKYPTIYHLRKKLVDSTDKADLRLIYLALAHMIKFRGHFLIEGDLNPDNSDVDKLFIQLVQTYNQLFEENPINASGVDAKAILSARLSKSRRLENLIAQLPGEKKNGLFGNLIALSLGLTPNFKSNFDLAEDAKLQLSKDTYDDDLDNLLAQIGDQYADLFLAAKNLSDAILLSDILRVNTEITKAPLSASMIKRYDEHHQDLTLLKALVRQQLPEKYKEIFFDQSKNGYAGYIDGGASQEEFYKFIKPILEKMDGTEELLVKLNREDLLRKQRTFDNGSIPHQIHLGELHAILRRQEDFYPFLKDNREKIEKILTFRIPYYVGPLARGNSRFAWMTRKSEETITPWNFEEVVDKGASAQSFIERMTNFDKNLPNEKVLPKHSLLYEYFTVYNELTKVKYVTEGMRKPAFLSGEQKKAIVDLLFKTNRKVTVKQLKEDYFKKIECFDSVEISGVEDRFNASLGTYHDLLKIIKDKDFLDNEENEDILEDIVLTLTLFEDREMIEERLKTYAHLFDDKVMKQLKRRRYTGWGRLSRKLINGIRDKQSGKTILDFLKSDGFANRNFMQLIHDDSLTFKEDIQKAQVSGQGDSLHEHIANLAGSPAIKKGILQTVKVVDELVKVMGRHKPENIVIEMARENQTTQKGQKNSRERMKRIEEGIKELGSQILKEHPVENTQLQNEKLYLYYLQNGRDMYVDQELDINRLSDYDVDHIVPQSFLKDDSIDNKVLTRSDKARGKSDNVPSEEVVKKMKNYWRQLLNAKLITQRKFDNLTKAERGGLSELDKAGFIKRQLVETRQITKHVAQILDSRMNTKYDENDKLIREVKVITLKSKLVSDFRKDFQFYKVREINNYHHAHDAYLNAVVGTALIKKYPKLESEFVYGDYKVYDVRKMIAKSEQEIGKATAKYFFYSNIMNFFKTEITLANGEIRKRPLIETNGETGEIVWDKGRDFATVRKVLSMPQVNIVKKTEVQTGGFSKESILPKRNSDKLIARKKDWDPKKYGGFDSPTVAYSVLVVAKVEKGKSKKLKSVKELLGITIMERSSFEKNPIDFLEAKGYKEVKKDLIIKLPKYSLFELENGRKRMLASAGELQKGNELALPSKYVNFLYLASHYEKLKGSPEDNEQKQLFVEQHKHYLDEIIEQISEFSKRVILADANLDKVLSAYNKHRDKPIREQAENIIHLFTLTNLGAPAAFKYFDTTIDRKRYTSTKEVLDATLIHQSITGLYETRIDLSQLGGDGGEAAAKGSSGGSGGTAPLEEEYRLFLEAPIQNVTLLEQWKREIPKVWAEINPPGLASTQAPIHVQLLSTALPVRVRQYPITLEAKRSLRETIRKFRAAGILRPVHSPWNTPLLPVRKSGTSEYRMVQDLREVNKRVETIHPTVPNPYTLLSLLPPDRIWYSVLDLKDAFFCIPLAPESQLIFAFEWADAEEGESGQLTWTRLPQGFKNSPTLFNEALNRDLQGFRLDHPSVSLLQYVDDLLIAADTQAACLSATRDLLMTLAELGYRVSGKKAQLCQEEVTYLGFKIHKGSRSLSNSRTQAILQIPVPKTKRQVREFLGKIGYCRLFIPGFAELAQPLYAATRPGNDPLVWGEKEEEAFQSLKLALTQPPALALPSLDKPFQLFVEETSGAAKGVLTQALGPWKRPVAYLSKRLDPVAAGWPRCLRAIAAAALLTREASKLTFGQDIEITSSHNLESLLRSPPDKWLTNARITQYQVLLLDPPRVRFKQTAALNPATLLPETDDTLPIHHCLDTLDSLTSTRPDLTDQPLAQAEATLFTDGSSYIRDGKRYAGAAVVTLDSVIWAEPLPIGTSAQKAELIALTKALEWSKDKSVNIYTDSRYAFATLHVHGMIYRERGWLTAGGKAIKNAPEILALLTAVWLPKRVAVMHCKGHQKDDAPTSTGNRRADEVAREVAIRPLSTQATISAGKRTADGSEFEKRTADGSEFESPKKKAKVE

SEQ ID NO: 7106 - protein, 2102 aa, synthetic construct
MPAAKRVKLDGGDKKYSIGLDIGTNSVGWAVITDEYKVPSKKFKVLGNTDRHSIKKNLIGALLFDSGETAEATRLKRTARRRYTRRKNRICYLQEIFSNEMAKVDDSFFHRLEESFLVEEDKKHERHPIFGNIVDEVAYHEKYPTIYHLRKKLVDSTDKADLRLIYLALAHMIKFRGHFLIEGDLNPDNSDVDKLFIQLVQTYNQLFEENPINASGVDAKAILSARLSKSRRLENLIAQLPGEKKNGLFGNLIALSLGLTPNFKSNFDLAEDAKLQLSKDTYDDDLDNLLAQIGDQYADLFLAAKNLSDAILLSDILRVNTEITKAPLSASMIKRYDEHHQDLTLLKALVRQQLPEKYKEIFFDQSKNGYAGYIDGGASQEEFYKFIKPILEKMDGTEELLVKLNREDLLRKQRTFDNGSIPHQIHLGELHAILRRQEDFYPFLKDNREKIEKILTFRIPYYVGPLARGNSRFAWMTRKSEETITPWNFEEVVDKGASAQSFIERMTNFDKNLPNEKVLPKHSLLYEYFTVYNELTKVKYVTEGMRKPAFLSGEQKKAIVDLLFKTNRKVTVKQLKEDYFKKIECFDSVEISGVEDRFNASLGTYHDLLKIIKDKDFLDNEENEDILEDIVLTLTLFEDREMIEERLKTYAHLFDDKVMKQLKRRRYTGWGRLSRKLINGIRDKQSGKTILDFLKSDGFANRNFMQLIHDDSLTFKEDIQKAQVSGQGDSLHEHIANLAGSPAIKKGILQTVKVVDELVKVMGRHKPENIVIEMARENQTTQKGQKNSRERMKRIEEGIKELGSQILKEHPVENTQLQNEKLYLYYLQNGRDMYVDQELDINRLSDYDVDHIVPQSFLKDDSIDNKVLTRSDKARGKSDNVPSEEVVKKMKNYWRQLLNAKLITQRKFDNLTKAERGGLSELDKAGFIKRQLVETRQITKHVAQILDSRMNTKYDENDKLIREVKVITLKSKLVSDFRKDFQFYKVREINNYHHAHDAYLNAVVGTALIKKYPKLESEFVYGDYKVYDVRKMIAKSEQEIGKATAKYFFYSNIMNFFKTEITLANGEIRKRPLIETNGETGEIVWDKGRDFATVRKVLSMPQVNIVKKTEVQTGGFSKESILPKRNSDKLIARKKDWDPKKYGGFDSPTVAYSVLVVAKVEKGKSKKLKSVKELLGITIMERSSFEKNPIDFLEAKGYKEVKKDLIIKLPKYSLFELENGRKRMLASAGELQKGNELALPSKYVNFLYLASHYEKLKGSPEDNEQKQLFVEQHKHYLDEIIEQISEFSKRVILADANLDKVLSAYNKHRDKPIREQAENIIHLFTLTNLGAPAAFKYFDTTIDRKRYTSTKEVLDATLIHQSITGLYETRIDLSQLGGDGGEAAAKGSSGGSGGTVSLQDEHRLFDIPVTTSLPDVWLQDFPQAWAETGGLGRAKCQAPIIIDLKPTAVPVSIKQYPMSLEAHMGIRQHIIKFLELGVLRPCRSPWNTPLLPVKKPGTQDYRPVQDLREINKRTVDIHPTVPNPYNLLSTLKPDYSWYTVLDLKDAFFCLPLAPQSQELFAFEWKDPERGISGQLTWTRLPQGFKNSPTLFNEALHRDLTDFRTQHPEVTLLQYVDDLLLAAPTKKACTQGTRHLLQELGEKGYRASAKKAQICQTKVTYLGYILSEGKRWLTPGRIETVARIPPPRNPREVREFLGKAGFCRLFIPGFAELAAPLYALTKPSTPFTWQTEHQLAFEALKKALLSAPALGLPDTSKPFTLFLDERQGIAKGVLTQKLGPWKRPVAYLSKKLDPVAAGWPPCLRIMAATAMLVKDSAKLTLGQPLTVITPHTLEAIVRQPPDRWITNARLTHYQALLLDTDRVQFGPPVTLNPATLLPVPENQPSPHDCRQVLAETHGTREDLKDQELPDADHTWYTDGSSYLDSGTRRAGAAVVDGHNTIWAQSLPPGTSAQKAELIALTKALELSKGKKANIYTDSRYAFATAHTHGSIYERRGWLTSEGKEIKNKAEIIALLKALFLPQEVAIIHCPGHQKGQDPVAVGNRQADRVARQAAMAEVLTLATEPDNTSHITAGKRTADGSEFEKRTADGSEFESPKKKAKVE

SEQ ID NO: 7107 - protein, 2087 aa, synthetic construct
MPAAKRVKLDGGDKKYSIGLDIGTNSVGWAVITDEYKVPSKKFKVLGNTDRHSIKKNLIGALLFDSGETAEATRLKRTARRRYTRRKNRICYLQEIFSNEMAKVDDSFFHRLEESFLVEEDKKHERHPIFGNIVDEVAYHEKYPTIYHLRKKLVDSTDKADLRLIYLALAHMIKFRGHFLIEGDLNPDNSDVDKLFIQLVQTYNQLFEENPINASGVDAKAILSARLSKSRRLENLIAQLPGEKKNGLFGNLIALSLGLTPNFKSNFDLAEDAKLQLSKDTYDDDLDNLLAQIGDQYADLFLAAKNLSDAILLSDILRVNTEITKAPLSASMIKRYDEHHQDLTLLKALVRQQLPEKYKEIFFDQSKNGYAGYIDGGASQEEFYKFIKPILEKMDGTEELLVKLNREDLLRKQRTFDNGSIPHQIHLGELHAILRRQEDFYPFLKDNREKIEKILTFRIPYYVGPLARGNSRFAWMTRKSEETITPWNFEEVVDKGASAQSFIERMTNFDKNLPNEKVLPKHSLLYEYFTVYNELTKVKYVTEGMRKPAFLSGEQKKAIVDLLFKTNRKVTVKQLKEDYFKKIECFDSVEISGVEDRFNASLGTYHDLLKIIKDKDFLDNEENEDILEDIVLTLTLFEDREMIEERLKTYAHLFDDKVMKQLKRRRYTGWGRLSRKLINGIRDKQSGKTILDFLKSDGFANRNFMQLIHDDSLTFKEDIQKAQVSGQGDSLHEHIANLAGSPAIKKGILQTVKVVDELVKVMGRHKPENIVIEMARENQTTQKGQKNSRERMKRIEEGIKELGSQILKEHPVENTQLQNEKLYLYYLQNGRDMYVDQELDINRLSDYDVDHIVPQSFLKDDSIDNKVLTRSDKARGKSDNVPSEEVVKKMKNYWRQLLNAKLITQRKFDNLTKAERGGLSELDKAGFIKRQLVETRQITKHVAQILDSRMNTKYDENDKLIREVKVITLKSKLVSDFRKDFQFYKVREINNYHHAHDAYLNAVVGTALIKKYPKLESEFVYGDYKVYDVRKMIAKSEQEIGKATAKYFFYSNIMNFFKTEITLANGEIRKRPLIETNGETGEIVWDKGRDFATVRKVLSMPQVNIVKKTEVQTGGFSKESILPKRNSDKLIARKKDWDPKKYGGFDSPTVAYSVLVVAKVEKGKSKKLKSVKELLGITIMERSSFEKNPIDFLEAKGYKEVKKDLIIKLPKYSLFELENGRKRMLASAGELQKGNELALPSKYVNFLYLASHYEKLKGSPEDNEQKQLFVEQHKHYLDEIIEQISEFSKRVILADANLDKVLSAYNKHRDKPIREQAENIIHLFTLTNLGAPAAFKYFDTTIDRKRYTSTKEVLDATLIHQSITGLYETRIDLSQLGGDGGEAAAKGSSGGSGGVPWILKKPLELTIKLDLEEQQGTLLNNSILSKKGKEELKQLFEKYSALWQSWENQVGHRRIRPHKIATGTVKPTPQKQYHINPKAKPDIQIVINDLLKQGVLIQKESTMNTPVYPVPKPNGRWRMVLDYRAVNKVTPLIAVQNQHSYGILGSLFKGRYKTTIDLSNGFWAHPIVPEDYWITAFTWQGKQYCWTVLPQGFLNSPGLFTGDVVDLLQGIPNVEVYVDDVYISHDSEKEHLEYLDILFNRLKEAGYIISLKKSNIANSIVDFLGFQITNEGRGLTDTFKEKLENITAPTTLKQLQSILGLLNFARNFIPDFTELIAPLYALIPKSTKNYVPWQIEHSTTLETLITKLNGAEYLQGRKGDKTLIMKVNASYTTGYIRYYNEGEKKPISYVSIVFSKTELKFTELEKLLTTVHKGLLKALDLSMGQNIHVYSPIVSMQNIQKTPQTAKKALASRWLSWLSYLEDPRIRFFYDPQMPALKDLPAVDTGKDNKKHPSNFQHIFYTDGSAITSPTKEGHLNAGMGIVYFINKDGNLQKQQEWSISLGNHTAQFAEIAAFEFALKKCLPLGGNILVVTDSNYVAKAYNEELDVWASNGFVNNRKKPLKHISKWKSVADLKRLRPDVVVTHEPGHQKLDSSPHAYGNNLADQLATQASFKVHAGKRTADGSEFEKRTADGSEFESPKKKAKVE

SEQ ID NO: 7108 - protein, 2087 aa, synthetic construct
MPAAKRVKLDGGDKKYSIGLDIGTNSVGWAVITDEYKVPSKKFKVLGNTDRHSIKKNLIGALLFDSGETAEATRLKRTARRRYTRRKNRICYLQEIFSNEMAKVDDSFFHRLEESFLVEEDKKHERHPIFGNIVDEVAYHEKYPTIYHLRKKLVDSTDKADLRLIYLALAHMIKFRGHFLIEGDLNPDNSDVDKLFIQLVQTYNQLFEENPINASGVDAKAILSARLSKSRRLENLIAQLPGEKKNGLFGNLIALSLGLTPNFKSNFDLAEDAKLQLSKDTYDDDLDNLLAQIGDQYADLFLAAKNLSDAILLSDILRVNTEITKAPLSASMIKRYDEHHQDLTLLKALVRQQLPEKYKEIFFDQSKNGYAGYIDGGASQEEFYKFIKPILEKMDGTEELLVKLNREDLLRKQRTFDNGSIPHQIHLGELHAILRRQEDFYPFLKDNREKIEKILTFRIPYYVGPLARGNSRFAWMTRKSEETITPWNFEEVVDKGASAQSFIERMTNFDKNLPNEKVLPKHSLLYEYFTVYNELTKVKYVTEGMRKPAFLSGEQKKAIVDLLFKTNRKVTVKQLKEDYFKKIECFDSVEISGVEDRFNASLGTYHDLLKIIKDKDFLDNEENEDILEDIVLTLTLFEDREMIEERLKTYAHLFDDKVMKQLKRRRYTGWGRLSRKLINGIRDKQSGKTILDFLKSDGFANRNFMQLIHDDSLTFKEDIQKAQVSGQGDSLHEHIANLAGSPAIKKGILQTVKVVDELVKVMGRHKPENIVIEMARENQTTQKGQKNSRERMKRIEEGIKELGSQILKEHPVENTQLQNEKLYLYYLQNGRDMYVDQELDINRLSDYDVDHIVPQSFLKDDSIDNKVLTRSDKARGKSDNVPSEEVVKKMKNYWRQLLNAKLITQRKFDNLTKAERGGLSELDKAGFIKRQLVETRQITKHVAQILDSRMNTKYDENDKLIREVKVITLKSKLVSDFRKDFQFYKVREINNYHHAHDAYLNAVVGTALIKKYPKLESEFVYGDYKVYDVRKMIAKSEQEIGKATAKYFFYSNIMNFFKTEITLANGEIRKRPLIETNGETGEIVWDKGRDFATVRKVLSMPQVNIVKKTEVQTGGFSKESILPKRNSDKLIARKKDWDPKKYGGFDSPTVAYSVLVVAKVEKGKSKKLKSVKELLGITIMERSSFEKNPIDFLEAKGYKEVKKDLIIKLPKYSLFELENGRKRMLASAGELQKGNELALPSKYVNFLYLASHYEKLKGSPEDNEQKQLFVEQHKHYLDEIIEQISEFSKRVILADANLDKVLSAYNKHRDKPIREQAENIIHLFTLTNLGAPAAFKYFDTTIDRKRYTSTKEVLDATLIHQSITGLYETRIDLSQLGGDGGEAAAKGSSGGSGGVPWILKKPLELTIKLDLEEQQGTLLNNSILSKKGKEELKQLFEKYSALWQSWENQVGHRRIRPHKIATGTVKPTPQKQYHINPKAKPDIQIVINDLLKQGVLIQKESTMNTPVYPVPKPNGRWRMVLDYRAVNKVTPLIAVQNQHSYGILGSLFKGRYKTTIDLSNGFWAHPIVPEDYWITAFTWQGKQYCWTVLPQGFLNSPGLFNGDVVDLLQGIPNVEVYVDDVYISHDSEKEHLEYLDILFNRLKEAGYIISLKKSNIANSIVDFLGFQITNEGRGLTDTFKEKLENITAPTTLKQLQSILGKLNFARNFIPDFTELIAPLYALIPKSPKNYVPWQIEHSTTLETLITKLNGAEYLQGRKGDKTLIMKVNASYTTGYIRYYNEGEKKPISYVSIVFSKTELKFTELEKLLTTVHKGLLKALDLSMGQNIHVYSPIVSMQNIQKTPQTAKKALASRWLSWLSYLEDPRIRFFYDPQMPALKDLPAVDTGKDNKKHPSNFQHIFYTDGSAITSPTKEGHLNAGMGIVYFINKDGNLQKQQEWSISLGNHTAQFAEIAAFEFALKKCLPLGGNILVVTDSNYVAKAYNEELDVWASNGFVNNRKKPLKHISKWKSVADLKRLRPDVVVTHEPGHQKLDSSPHAYGNNLADQLATQASFKVHAGKRTADGSEFEKRTADGSEFESPKKKAKVE

SEQ ID NO: 7109 - protein, 2094 aa, synthetic construct
MPAAKRVKLDGGDKKYSIGLDIGTNSVGWAVITDEYKVPSKKFKVLGNTDRHSIKKNLIGALLFDSGETAEATRLKRTARRRYTRRKNRICYLQEIFSNEMAKVDDSFFHRLEESFLVEEDKKHERHPIFGNIVDEVAYHEKYPTIYHLRKKLVDSTDKADLRLIYLALAHMIKFRGHFLIEGDLNPDNSDVDKLFIQLVQTYNQLFEENPINASGVDAKAILSARLSKSRRLENLIAQLPGEKKNGLFGNLIALSLGLTPNFKSNFDLAEDAKLQLSKDTYDDDLDNLLAQIGDQYADLFLAAKNLSDAILLSDILRVNTEITKAPLSASMIKRYDEHHQDLTLLKALVRQQLPEKYKEIFFDQSKNGYAGYIDGGASQEEFYKFIKPILEKMDGTEELLVKLNREDLLRKQRTFDNGSIPHQIHLGELHAILRRQEDFYPFLKDNREKIEKILTFRIPYYVGPLARGNSRFAWMTRKSEETITPWNFEEVVDKGASAQSFIERMTNFDKNLPNEKVLPKHSLLYEYFTVYNELTKVKYVTEGMRKPAFLSGEQKKAIVDLLFKTNRKVTVKQLKEDYFKKIECFDSVEISGVEDRFNASLGTYHDLLKIIKDKDFLDNEENEDILEDIVLTLTLFEDREMIEERLKTYAHLFDDKVMKQLKRRRYTGWGRLSRKLINGIRDKQSGKTILDFLKSDGFANRNFMQLIHDDSLTFKEDIQKAQVSGQGDSLHEHIANLAGSPAIKKGILQTVKVVDELVKVMGRHKPENIVIEMARENQTTQKGQKNSRERMKRIEEGIKELGSQILKEHPVENTQLQNEKLYLYYLQNGRDMYVDQELDINRLSDYDVDHIVPQSFLKDDSIDNKVLTRSDKARGKSDNVPSEEVVKKMKNYWRQLLNAKLITQRKFDNLTKAERGGLSELDKAGFIKRQLVETRQITKHVAQILDSRMNTKYDENDKLIREVKVITLKSKLVSDFRKDFQFYKVREINNYHHAHDAYLNAVVGTALIKKYPKLESEFVYGDYKVYDVRKMIAKSEQEIGKATAKYFFYSNIMNFFKTEITLANGEIRKRPLIETNGETGEIVWDKGRDFATVRKVLSMPQVNIVKKTEVQTGGFSKESILPKRNSDKLIARKKDWDPKKYGGFDSPTVAYSVLVVAKVEKGKSKKLKSVKELLGITIMERSSFEKNPIDFLEAKGYKEVKKDLIIKLPKYSLFELENGRKRMLASAGELQKGNELALPSKYVNFLYLASHYEKLKGSPEDNEQKQLFVEQHKHYLDEIIEQISEFSKRVILADANLDKVLSAYNKHRDKPIREQAENIIHLFTLTNLGAPAAFKYFDTTIDRKRYTSTKEVLDATLIHQSITGLYETRIDLSQLGGDGGEAAAKGSSGGSGGVLNLEEEYRLHEKPVPSSIDPSWLQLFPTVWAERAGMGLANQVPPVVVELRSGASPVAVRQYPMSKEAREGIRPHIQKFLDLGVLVPCRSPWNTPLLPVKKPGTNDYRPVQDLREINKRVQDIHPTVPNPYNLLSSLPPSYTWYSVLDLKDAFFCLRLHPNSQPLFAFEWKDPEKGNTGQLTWTRLPQGFKNSPTLFNEALHRDLAPFRALNPQVVLLQYVDDLLVAAPTYEDCKKGTQKLLQELSKLGYRVSAKKAQLCQREVTYLGYLLKEGKRWLTPARKATVMKIPVPTTPRQVREFLGTAGFCRLWIPGFASLAAPLYPLTKPSIPFIWTEEHQQAFDHIKKALLSAPALALPDLTKPFTLYIDERAGVARGVLTQTLGPWRRPVAYLSKKLDPVASGWPTCLKAVAAVALLLKDADKLTLGQNVTVIASHSLESIVRQPPDRWMTNARMTHYQSLLLNERVSFAPPAVLNPATLLPVESEATPVHRCSEILAEETGTRRDLEDQPLPGVPTWYTDGSSFITEGKRRAGAPIVDGKRTVWASSLPEGTSAQKAELVALTQALRLAEGKNINIYTDSRYAFATAHIHGAIYKQRGWLTSAGKDIKNKEEILALLEAIHLPRRVAIIHCPGHQRGSNPVATGNRRADEAAKQAALSTRVLAGTTKPAGKRTADGSEFEKRTADGSEFESPKKKAKVE

SEQ ID NO: 7110 - protein, 2127 aa, synthetic construct
MPAAKRVKLDGGDKKYSIGLDIGTNSVGWAVITDEYKVPSKKFKVLGNTDRHSIKKNLIGALLFDSGETAEATRLKRTARRRYTRRKNRICYLQEIFSNEMAKVDDSFFHRLEESFLVEEDKKHERHPIFGNIVDEVAYHEKYPTIYHLRKKLVDSTDKADLRLIYLALAHMIKFRGHFLIEGDLNPDNSDVDKLFIQLVQTYNQLFEENPINASGVDAKAILSARLSKSRRLENLIAQLPGEKKNGLFGNLIALSLGLTPNFKSNFDLAEDAKLQLSKDTYDDDLDNLLAQIGDQYADLFLAAKNLSDAILLSDILRVNTEITKAPLSASMIKRYDEHHQDLTLLKALVRQQLPEKYKEIFFDQSKNGYAGYIDGGASQEEFYKFIKPILEKMDGTEELLVKLNREDLLRKQRTFDNGSIPHQIHLGELHAILRRQEDFYPFLKDNREKIEKILTFRIPYYVGPLARGNSRFAWMTRKSEETITPWNFEEVVDKGASAQSFIERMTNFDKNLPNEKVLPKHSLLYEYFTVYNELTKVKYVTEGMRKPAFLSGEQKKAIVDLLFKTNRKVTVKQLKEDYFKKIECFDSVEISGVEDRFNASLGTYHDLLKIIKDKDFLDNEENEDILEDIVLTLTLFEDREMIEERLKTYAHLFDDKVMKQLKRRRYTGWGRLSRKLINGIRDKQSGKTILDFLKSDGFANRNFMQLIHDDSLTFKEDIQKAQVSGQGDSLHEHIANLAGSPAIKKGILQTVKVVDELVKVMGRHKPENIVIEMARENQTTQKGQKNSRERMKRIEEGIKELGSQILKEHPVENTQLQNEKLYLYYLQNGRDMYVDQELDINRLSDYDVDHIVPQSFLKDDSIDNKVLTRSDKARGKSDNVPSEEVVKKMKNYWRQLLNAKLITQRKFDNLTKAERGGLSELDKAGFIKRQLVETRQITKHVAQILDSRMNTKYDENDKLIREVKVITLKSKLVSDFRKDFQFYKVREINNYHHAHDAYLNAVVGTALIKKYPKLESEFVYGDYKVYDVRKMIAKSEQEIGKATAKYFFYSNIMNFFKTEITLANGEIRKRPLIETNGETGEIVWDKGRDFATVRKVLSMPQVNIVKKTEVQTGGFSKESILPKRNSDKLIARKKDWDPKKYGGFDSPTVAYSVLVVAKVEKGKSKKLKSVKELLGITIMERSSFEKNPIDFLEAKGYKEVKKDLIIKLPKYSLFELENGRKRMLASAGELQKGNELALPSKYVNFLYLASHYEKLKGSPEDNEQKQLFVEQHKHYLDEIIEQISEFSKRVILADANLDKVLSAYNKHRDKPIREQAENIIHLFTLTNLGAPAAFKYFDTTIDRKRYTSTKEVLDATLIHQSITGLYETRIDLSQLGGDGGEAAAKGSSGGSGGLLGRDLLTKLKAQIQFSTEGPQVTWEDRPAMCLVLNLEEEYRLHEKPVPPSIDPSWLQLFPMVWAEKAGMGLANQVPPVVVELKSDASPVAVRQYPMSKEAREGIRPHIQRFLDLGILVPCQSPWNTPLLPVKKPGTNDYRPVQDLREVNKRVQDIHPTVPNPYNLLSSLPPSHTWYSVLDLKDAFFCLKLHPNSQPLFAFEWRDPEKGNTGQLTWTRLPQGFKNSPTLFNEALHRDLASFRALNPQVVMLQYVDDLLVAAPTYRDCKEGTRRLLQELSKLGYRVSAKKAQLCREEVTYLGYLLKGGKRWLTPARKATVMKIPTPTTPRQVREFLGTAGFCRLWIPGFASLAAPLYPLTRPKVPFTWTEAHQEAFGRIKEALLSAPALALPDLTKPFALYVDEKEGVARGVLTQTLGPWRRPVAYLSKKLDPVASGWPTCLKAIAAVALLLKDADKLTLGQNVLVIAPHNLESIVRQPPDRWMTNARMTHYQSLLLNERVSFAPPAILNPATLLPVESDDTPIHICSEILAEETGTRPDLRDQPLPGVPAWYTDGSSFIMDGRRQAGAAIVDNKRTVWASNLPEGTSAQKAELIALTQALRLAEGKSINIYTDSRYAFATAHVHGAIYKQRGWLTSAGKDIKNKEEILALLEAIHLPKRVAIIHCPGHQRGTDPVATGNRKADEAAKQAAQSTRILTETTKNAGKRTADGSEFEKRTADGSEFESPKKKAKVE

SEQ ID NO: 7111 - protein, 2218 aa, synthetic construct
MPAAKRVKLDGGDKKYSIGLDIGTNSVGWAVITDEYKVPSKKFKVLGNTDRHSIKKNLIGALLFDSGETAEATRLKRTARRRYTRRKNRICYLQEIFSNEMAKVDDSFFHRLEESFLVEEDKKHERHPIFGNIVDEVAYHEKYPTIYHLRKKLVDSTDKADLRLIYLALAHMIKFRGHFLIEGDLNPDNSDVDKLFIQLVQTYNQLFEENPINASGVDAKAILSARLSKSRRLENLIAQLPGEKKNGLFGNLIALSLGLTPNFKSNFDLAEDAKLQLSKDTYDDDLDNLLAQIGDQYADLFLAAKNLSDAILLSDILRVNTEITKAPLSASMIKRYDEHHQDLTLLKALVRQQLPEKYKEIFFDQSKNGYAGYIDGGASQEEFYKFIKPILEKMDGTEELLVKLNREDLLRKQRTFDNGSIPHQIHLGELHAILRRQEDFYPFLKDNREKIEKILTFRIPYYVGPLARGNSRFAWMTRKSEETITPWNFEEVVDKGASAQSFIERMTNFDKNLPNEKVLPKHSLLYEYFTVYNELTKVKYVTEGMRKPAFLSGEQKKAIVDLLFKTNRKVTVKQLKEDYFKKIECFDSVEISGVEDRFNASLGTYHDLLKIIKDKDFLDNEENEDILEDIVLTLTLFEDREMIEERLKTYAHLFDDKVMKQLKRRRYTGWGRLSRKLINGIRDKQSGKTILDFLKSDGFANRNFMQLIHDDSLTFKEDIQKAQVSGQGDSLHEHIANLAGSPAIKKGILQTVKVVDELVKVMGRHKPENIVIEMARENQTTQKGQKNSRERMKRIEEGIKELGSQILKEHPVENTQLQNEKLYLYYLQNGRDMYVDQELDINRLSDYDVDHIVPQSFLKDDSIDNKVLTRSDKARGKSDNVPSEEVVKKMKNYWRQLLNAKLITQRKFDNLTKAERGGLSELDKAGFIKRQLVETRQITKHVAQILDSRMNTKYDENDKLIREVKVITLKSKLVSDFRKDFQFYKVREINNYHHAHDAYLNAVVGTALIKKYPKLESEFVYGDYKVYDVRKMIAKSEQEIGKATAKYFFYSNIMNFFKTEITLANGEIRKRPLIETNGETGEIVWDKGRDFATVRKVLSMPQVNIVKKTEVQTGGFSKESILPKRNSDKLIARKKDWDPKKYGGFDSPTVAYSVLVVAKVEKGKSKKLKSVKELLGITIMERSSFEKNPIDFLEAKGYKEVKKDLIIKLPKYSLFELENGRKRMLASAGELQKGNELALPSKYVNFLYLASHYEKLKGSPEDNEQKQLFVEQHKHYLDEIIEQISEFSKRVILADANLDKVLSAYNKHRDKPIREQAENIIHLFTLTNLGAPAAFKYFDTTIDRKRYTSTKEVLDATLIHQSITGLYETRIDLSQLGGDGGEAAAKGSSGGSGGTLGDQGSRGSDPLPEPRVTLTVEGIPTEFLVNTGAEHSVLTKPMGKMGSKRTVVAGATGSKVYPWTTKRLLKIGQKQVTHSFLVIPECPAPLLGRDLLTKLKAQIQFSTEGPQVTWEDRPAMCLVLNLEEEYRLHEKPVPPSIDPSWLQLFPMVWAEKAGMGLANQVPPVVVELKSDASPVAVRQYPMSKEAREGIRPHIQRFLDLGILVPCQSPWNTPLLPVKKPGTNDYRPVQDLREVNKRVQDIHPTVPNPYNLLSSLPPSHTWYSVLDLKDAFFCLKLHPNSQPLFAFEWRDPEKGNTGQLTWTRLPQGFKNSPTLFNEALHRDLASFRALNPQVVMLQYVDDLLVAAPTYRDCKEGTRRLLQELSKLGYRVSAKKAQLCREEVTYLGYLLKGGKRWLTPARKATVMKIPTPTTPRQVREFLGTAGFCRLWIPGFASLAAPLYPLTRPKVPFTWTEAHQEAFGRIKEALLSAPALALPDLTKPFALYVDEKEGVARGVLTQTLGPWRRPVAYLSKKLDPVASGWPTCLKAIAAVALLLKDADKLTLGQNVLVIAPHNLESIVRQPPDRWMTNARMTHYQSLLLNERVSFAPPAILNPATLLPVESDDTPIHICSEILAEETGTRPDLRDQPLPGVPAWYTDGSSFIMDGRRQAGAAIVDNKRTVWASNLPEGTSAQKAELIALTQALRLAEGKSINIYTDSRYAFATAHVHGAIYKQRGWLTSAGKDIKNKEEILALLEAIHLPKRVAIIHCPGHQRGTDPVATGNRKADEAAKQAAQSTRILTETTKNAGKRTADGSEFEKRTADGSEFESPKKKAKVE

SEQ ID NO: 7112 - protein, 2218 aa, synthetic construct
MPAAKRVKLDGGDKKYSIGLDIGTNSVGWAVITDEYKVPSKKFKVLGNTDRHSIKKNLIGALLFDSGETAEATRLKRTARRRYTRRKNRICYLQEIFSNEMAKVDDSFFHRLEESFLVEEDKKHERHPIFGNIVDEVAYHEKYPTIYHLRKKLVDSTDKADLRLIYLALAHMIKFRGHFLIEGDLNPDNSDVDKLFIQLVQTYNQLFEENPINASGVDAKAILSARLSKSRRLENLIAQLPGEKKNGLFGNLIALSLGLTPNFKSNFDLAEDAKLQLSKDTYDDDLDNLLAQIGDQYADLFLAAKNLSDAILLSDILRVNTEITKAPLSASMIKRYDEHHQDLTLLKALVRQQLPEKYKEIFFDQSKNGYAGYIDGGASQEEFYKFIKPILEKMDGTEELLVKLNREDLLRKQRTFDNGSIPHQIHLGELHAILRRQEDFYPFLKDNREKIEKILTFRIPYYVGPLARGNSRFAWMTRKSEETITPWNFEEVVDKGASAQSFIERMTNFDKNLPNEKVLPKHSLLYEYFTVYNELTKVKYVTEGMRKPAFLSGEQKKAIVDLLFKTNRKVTVKQLKEDYFKKIECFDSVEISGVEDRFNASLGTYHDLLKIIKDKDFLDNEENEDILEDIVLTLTLFEDREMIEERLKTYAHLFDDKVMKQLKRRRYTGWGRLSRKLINGIRDKQSGKTILDFLKSDGFANRNFMQLIHDDSLTFKEDIQKAQVSGQGDSLHEHIANLAGSPAIKKGILQTVKVVDELVKVMGRHKPENIVIEMARENQTTQKGQKNSRERMKRIEEGIKELGSQILKEHPVENTQLQNEKLYLYYLQNGRDMYVDQELDINRLSDYDVDHIVPQSFLKDDSIDNKVLTRSDKARGKSDNVPSEEVVKKMKNYWRQLLNAKLITQRKFDNLTKAERGGLSELDKAGFIKRQLVETRQITKHVAQILDSRMNTKYDENDKLIREVKVITLKSKLVSDFRKDFQFYKVREINNYHHAHDAYLNAVVGTALIKKYPKLESEFVYGDYKVYDVRKMIAKSEQEIGKATAKYFFYSNIMNFFKTEITLANGEIRKRPLIETNGETGEIVWDKGRDFATVRKVLSMPQVNIVKKTEVQTGGFSKESILPKRNSDKLIARKKDWDPKKYGGFDSPTVAYSVLVVAKVEKGKSKKLKSVKELLGITIMERSSFEKNPIDFLEAKGYKEVKKDLIIKLPKYSLFELENGRKRMLASAGELQKGNELALPSKYVNFLYLASHYEKLKGSPEDNEQKQLFVEQHKHYLDEIIEQISEFSKRVILADANLDKVLSAYNKHRDKPIREQAENIIHLFTLTNLGAPAAFKYFDTTIDRKRYTSTKEVLDATLIHQSITGLYETRIDLSQLGGDGGEAAAKGSSGGSGGTLGDQGSRGSDPLPEPRVTLTVEGIPTEFLVNTGAEHSVLTKPMGKMGSKRTVVAGATGSKVYPWTTKRLLKIGQKQVTHSFLVIPECPAPLLGRDLLTKLKAQIQFSTEGPQVTWEDRPAMCLVLNLEEEYRLHEKPVPPSIDPSWLQLFPMVWAEKAGMGLANQVPPVVVELKSDASPVAVRQYPMSKEAREGIRPHIQRFLDLGILVPCQSPWNTPLLPVKKPGTNDYRPVQDLREVNKRVQDIHPTVPNPYNLLSSLPPSHTWYSVLDLKDAFFCLKLHPNSQPLFAFEWRDPEKGNTGQLTWTRLPQGFKNSPTLFNEALHRDLASFRALNPQVVMLQYVDDLLVAAPTYRDCKEGTRRLLQELSKLGYRVSAKKAQLCREEVTYLGYLLKGGKRWLTPARKATVMKIPTPTTPRQVREFLGKAGFCRLFIPGFASLAAPLYPLTRPKVPFTWTEAHQEAFGRIKEALLSAPALALPDLTKPFALYVDEKEGVARGVLTQTLGPWRRPVAYLSKKLDPVASGWPTCLKAIAAVALLLKDADKLTLGQNVLVIAPHNLESIVRQPPDRWMTNARMTHYQSLLLNERVSFAPPAILNPATLLPVESDDTPIHICSEILAEETGTRPDLRDQPLPGVPAWYTDGSSFIMDGRRQAGAAIVDNKRTVWASNLPEGTSAQKAELIALTQALRLAEGKSINIYTDSRYAFATAHVHGAIYKQRGWLTSAGKDIKNKEEILALLEAIHLPKRVAIIHCPGHQRGTDPVATGNRKADEAAKQAAQSTRILTETTKNAGKRTADGSEFEKRTADGSEFESPKKKAKVE

SEQ ID NO: 7113 - protein, 2096 aa, synthetic construct
MPAAKRVKLDGGDKKYSIGLDIGTNSVGWAVITDEYKVPSKKFKVLGNTDRHSIKKNLIGALLFDSGETAEATRLKRTARRRYTRRKNRICYLQEIFSNEMAKVDDSFFHRLEESFLVEEDKKHERHPIFGNIVDEVAYHEKYPTIYHLRKKLVDSTDKADLRLIYLALAHMIKFRGHFLIEGDLNPDNSDVDKLFIQLVQTYNQLFEENPINASGVDAKAILSARLSKSRRLENLIAQLPGEKKNGLFGNLIALSLGLTPNFKSNFDLAEDAKLQLSKDTYDDDLDNLLAQIGDQYADLFLAAKNLSDAILLSDILRVNTEITKAPLSASMIKRYDEHHQDLTLLKALVRQQLPEKYKEIFFDQSKNGYAGYIDGGASQEEFYKFIKPILEKMDGTEELLVKLNREDLLRKQRTFDNGSIPHQIHLGELHAILRRQEDFYPFLKDNREKIEKILTFRIPYYVGPLARGNSRFAWMTRKSEETITPWNFEEVVDKGASAQSFIERMTNFDKNLPNEKVLPKHSLLYEYFTVYNELTKVKYVTEGMRKPAFLSGEQKKAIVDLLFKTNRKVTVKQLKEDYFKKIECFDSVEISGVEDRFNASLGTYHDLLKIIKDKDFLDNEENEDILEDIVLTLTLFEDREMIEERLKTYAHLFDDKVMKQLKRRRYTGWGRLSRKLINGIRDKQSGKTILDFLKSDGFANRNFMQLIHDDSLTFKEDIQKAQVSGQGDSLHEHIANLAGSPAIKKGILQTVKVVDELVKVMGRHKPENIVIEMARENQTTQKGQKNSRERMKRIEEGIKELGSQILKEHPVENTQLQNEKLYLYYLQNGRDMYVDQELDINRLSDYDVDHIVPQSFLKDDSIDNKVLTRSDKARGKSDNVPSEEVVKKMKNYWRQLLNAKLITQRKFDNLTKAERGGLSELDKAGFIKRQLVETRQITKHVAQILDSRMNTKYDENDKLIREVKVITLKSKLVSDFRKDFQFYKVREINNYHHAHDAYLNAVVGTALIKKYPKLESEFVYGDYKVYDVRKMIAKSEQEIGKATAKYFFYSNIMNFFKTEITLANGEIRKRPLIETNGETGEIVWDKGRDFATVRKVLSMPQVNIVKKTEVQTGGFSKESILPKRNSDKLIARKKDWDPKKYGGFDSPTVAYSVLVVAKVEKGKSKKLKSVKELLGITIMERSSFEKNPIDFLEAKGYKEVKKDLIIKLPKYSLFELENGRKRMLASAGELQKGNELALPSKYVNFLYLASHYEKLKGSPEDNEQKQLFVEQHKHYLDEIIEQISEFSKRVILADANLDKVLSAYNKHRDKPIREQAENIIHLFTLTNLGAPAAFKYFDTTIDRKRYTSTKEVLDATLIHQSITGLYETRIDLSQLGGDGGEAAAKGSSGGSGGTLNLEDEYRLYETSAEPEVSPGSTWLSDFPQAWAETGGMGLAVRQAPLIIPLKATSTPVSIKQYPMSQEAKLGIKPHIQRLLDQGILVPCQSPWNTPLLPVKKPGTNDYRPVQDLREVNKRVEDIHPTVPNPYNLLSGLPPSHRWYTVLDLKDAFFCLRLHPTSQPLFAFEWRDPGMGISGQLTWTRLPQGFKNSPTLFNEALHRDLADFRIQHPDLILLQYVDDILLAATSELDCQQGTRALLLTLGNLGYRASAKKAQLCQKQVKYLGYLLKEGQRWLTEARKETVMGQPTPKTPRQLREFLGTAGFCRLWIPGFAEMAAPLYPLTKPGTLFNWGPDQQKAYQEIKQALLTAPALGLPDLTKPFELFVDEKQGYAKGVLTQKLGPWRRPVAYLSKKLDPVAAGWPPCLRMVAAIAVLRKDAGKLTMGQPLVILAPHAVEALVKQPPDRWLSNARMTHYQAMLLDTDRVQFGPVVALNPATLLPLPEEGAPHDCLEILAETHGTRPDLTDQPIPDADHTWYTDGSSFLQEGQRKAGAAVTTETEVIWARALPAGTSAQRAELIALTQALKMAEGKRLNVYTDSRYAFATAHIHGEIYRRRGWLTSEGREIKNKSEILALLKALFLPKRLSIIHCLGHQKGDSAEARGNRLADQAAREAAIKTPPDTSTLLAGKRTADGSEFEKRTADGSEFESPKKKAKVE

SEQ ID NO: 7114 - protein, 2096 aa, synthetic construct
MPAAKRVKLDGGDKKYSIGLDIGTNSVGWAVITDEYKVPSKKFKVLGNTDRHSIKKNLIGALLFDSGETAEATRLKRTARRRYTRRKNRICYLQEIFSNEMAKVDDSFFHRLEESFLVEEDKKHERHPIFGNIVDEVAYHEKYPTIYHLRKKLVDSTDKADLRLIYLALAHMIKFRGHFLIEGDLNPDNSDVDKLFIQLVQTYNQLFEENPINASGVDAKAILSARLSKSRRLENLIAQLPGEKKNGLFGNLIALSLGLTPNFKSNFDLAEDAKLQLSKDTYDDDLDNLLAQIGDQYADLFLAAKNLSDAILLSDILRVNTEITKAPLSASMIKRYDEHHQDLTLLKALVRQQLPEKYKEIFFDQSKNGYAGYIDGGASQEEFYKFIKPILEKMDGTEELLVKLNREDLLRKQRTFDNGSIPHQIHLGELHAILRRQEDFYPFLKDNREKIEKILTFRIPYYVGPLARGNSRFAWMTRKSEETITPWNFEEVVDKGASAQSFIERMTNFDKNLPNEKVLPKHSLLYEYFTVYNELTKVKYVTEGMRKPAFLSGEQKKAIVDLLFKTNRKVTVKQLKEDYFKKIECFDSVEISGVEDRFNASLGTYHDLLKIIKDKDFLDNEENEDILEDIVLTLTLFEDREMIEERLKTYAHLFDDKVMKQLKRRRYTGWGRLSRKLINGIRDKQSGKTILDFLKSDGFANRNFMQLIHDDSLTFKEDIQKAQVSGQGDSLHEHIANLAGSPAIKKGILQTVKVVDELVKVMGRHKPENIVIEMARENQTTQKGQKNSRERMKRIEEGIKELGSQILKEHPVENTQLQNEKLYLYYLQNGRDMYVDQELDINRLSDYDVDHIVPQSFLKDDSIDNKVLTRSDKARGKSDNVPSEEVVKKMKNYWRQLLNAKLITQRKFDNLTKAERGGLSELDKAGFIKRQLVETRQITKHVAQILDSRMNTKYDENDKLIREVKVITLKSKLVSDFRKDFQFYKVREINNYHHAHDAYLNAVVGTALIKKYPKLESEFVYGDYKVYDVRKMIAKSEQEIGKATAKYFFYSNIMNFFKTEITLANGEIRKRPLIETNGETGEIVWDKGRDFATVRKVLSMPQVNIVKKTEVQTGGFSKESILPKRNSDKLIARKKDWDPKKYGGFDSPTVAYSVLVVAKVEKGKSKKLKSVKELLGITIMERSSFEKNPIDFLEAKGYKEVKKDLIIKLPKYSLFELENGRKRMLASAGELQKGNELALPSKYVNFLYLASHYEKLKGSPEDNEQKQLFVEQHKHYLDEIIEQISEFSKRVILADANLDKVLSAYNKHRDKPIREQAENIIHLFTLTNLGAPAAFKYFDTTIDRKRYTSTKEVLDATLIHQSITGLYETRIDLSQLGGDGGEAAAKGSSGGSGGTLNIEDEYRLHETSKGPDVPLGSTWLSDFPQAWAETGGMGLAVRQAPLIIPLKATSTPVSIKQYPMSQEARLGIKPHIQRLLDQGILVPCQSPWNTPLLPVKKPGTNDYRPVQDLREVNKRVEDIHPTVPNPYNLLSGLPPSHQWYTVLDLKDAFFCLRLHPTSQSLFAFEWRDPEMGISGQLTWTRLPQGFKNSPTLFDEALHRDLADFRIQHPDLILLQYVDDLLLAATSELDCQQGTRALLQTLGDLGYRASAKKAQICQKQVKYLGYLLKEGQRWLTEARKETVMGQPTPKTPRQLREFLGTAGFCRLWIPGFAEMAAPLYPLTKTGTLFEWGPDQQKAYQEIKQALLTAPALGLPDLTKPFELFVDEKQGYAKGVLTQKLGPWRRPVAYLSKKLDPVAAGWPPCLRMVAAIAVLTKDAGKLTMGQPLVILAPHAVEALVKQPPDRWLSNARMTHYQALLLDTDRVQFGPIVALNPATLLPLPEEGLQHDCLDILAEAHGTRPDLTDQPLPDADHTWYTDGSSFLQEGQRKAGAAVTTETEVVWAKALPAGTSAQRAELIALTQALKMAEGKKLNVYTDSRYAFATAHIHGEIYRRRGLLTSEGKEIKNKDEILALLKALFLPKRLSIIHCPGHQKGNRAEARGNRMADQAAREVATRETPETSTLLAGKRTADGSEFEKRTADGSEFESPKKKAKVE

SEQ ID NO: 7115 - protein, 2096 aa, synthetic construct
MPAAKRVKLDGGDKKYSIGLDIGTNSVGWAVITDEYKVPSKKFKVLGNTDRHSIKKNLIGALLFDSGETAEATRLKRTARRRYTRRKNRICYLQEIFSNEMAKVDDSFFHRLEESFLVEEDKKHERHPIFGNIVDEVAYHEKYPTIYHLRKKLVDSTDKADLRLIYLALAHMIKFRGHFLIEGDLNPDNSDVDKLFIQLVQTYNQLFEENPINASGVDAKAILSARLSKSRRLENLIAQLPGEKKNGLFGNLIALSLGLTPNFKSNFDLAEDAKLQLSKDTYDDDLDNLLAQIGDQYADLFLAAKNLSDAILLSDILRVNTEITKAPLSASMIKRYDEHHQDLTLLKALVRQQLPEKYKEIFFDQSKNGYAGYIDGGASQEEFYKFIKPILEKMDGTEELLVKLNREDLLRKQRTFDNGSIPHQIHLGELHAILRRQEDFYPFLKDNREKIEKILTFRIPYYVGPLARGNSRFAWMTRKSEETITPWNFEEVVDKGASAQSFIERMTNFDKNLPNEKVLPKHSLLYEYFTVYNELTKVKYVTEGMRKPAFLSGEQKKAIVDLLFKTNRKVTVKQLKEDYFKKIECFDSVEISGVEDRFNASLGTYHDLLKIIKDKDFLDNEENEDILEDIVLTLTLFEDREMIEERLKTYAHLFDDKVMKQLKRRRYTGWGRLSRKLINGIRDKQSGKTILDFLKSDGFANRNFMQLIHDDSLTFKEDIQKAQVSGQGDSLHEHIANLAGSPAIKKGILQTVKVVDELVKVMGRHKPENIVIEMARENQTTQKGQKNSRERMKRIEEGIKELGSQILKEHPVENTQLQNEKLYLYYLQNGRDMYVDQELDINRLSDYDVDHIVPQSFLKDDSIDNKVLTRSDKARGKSDNVPSEEVVKKMKNYWRQLLNAKLITQRKFDNLTKAERGGLSELDKAGFIKRQLVETRQITKHVAQILDSRMNTKYDENDKLIREVKVITLKSKLVSDFRKDFQFYKVREINNYHHAHDAYLNAVVGTALIKKYPKLESEFVYGDYKVYDVRKMIAKSEQEIGKATAKYFFYSNIMNFFKTEITLANGEIRKRPLIETNGETGEIVWDKGRDFATVRKVLSMPQVNIVKKTEVQTGGFSKESILPKRNSDKLIARKKDWDPKKYGGFDSPTVAYSVLVVAKVEKGKSKKLKSVKELLGITIMERSSFEKNPIDFLEAKGYKEVKKDLIIKLPKYSLFELENGRKRMLASAGELQKGNELALPSKYVNFLYLASHYEKLKGSPEDNEQKQLFVEQHKHYLDEIIEQISEFSKRVILADANLDKVLSAYNKHRDKPIREQAENIIHLFTLTNLGAPAAFKYFDTTIDRKRYTSTKEVLDATLIHQSITGLYETRIDLSQLGGDGGEAAAKGSSGGSGGTLNIEDEYRLHETSKGPDVPLGSTWLSDFPQAWAETGGMGLAVRQAPLIIPLKATSTPVSIKQYPMSQEARLGIKPHIQRLLDQGILVPCQSPWNTPLLPVKKPGTNDYRPVQDLREVNKRVEDIHPTVPNPYNLLSGLPPSHQWYTVLDLKDAFFCLRLHPTSQSLFAFEWRDPEMGISGQLTWTRLPQGFKNSPTLFNEALHRDLADFRIQHPDLILLQYVDDLLLAATSELDCQQGTRALLQTLGDLGYRASAKKAQICQKQVKYLGYLLKEGQRWLTEARKETVMGQPTPKTPRQLREFLGKAGFCRLFIPGFAEMAAPLYPLTKPGTLFEWGPDQQKAYQEIKQALLTAPALGLPDLTKPFELFVDEKQGYAKGVLTQKLGPWRRPVAYLSKKLDPVAAGWPPCLRMVAAIAVLTKDAGKLTMGQPLVILAPHAVEALVKQPPDRWLSNARMTHYQALLLDTDRVQFGPIVALNPATLLPLPEEGLQHDCLDILAEAHGTRPDLTDQPLPDADHTWYTDGSSFLQEGQRKAGAAVTTETEVVWAKALPAGTSAQRAELIALTQALKMAEGKKLNVYTDSRYAFATAHIHGEIYRRRGWLTSEGKEIKNKDEILALLKALFLPKRLSIIHCPGHQKGNRAEARGNRMADQAAREVATRETPETSTLLAGKRTADGSEFEKRTADGSEFESPKKKAKVE

SEQ ID NO: 7116 - protein, 2096 aa, synthetic construct
MPAAKRVKLDGGDKKYSIGLDIGTNSVGWAVITDEYKVPSKKFKVLGNTDRHSIKKNLIGALLFDSGETAEATRLKRTARRRYTRRKNRICYLQEIFSNEMAKVDDSFFHRLEESFLVEEDKKHERHPIFGNIVDEVAYHEKYPTIYHLRKKLVDSTDKADLRLIYLALAHMIKFRGHFLIEGDLNPDNSDVDKLFIQLVQTYNQLFEENPINASGVDAKAILSARLSKSRRLENLIAQLPGEKKNGLFGNLIALSLGLTPNFKSNFDLAEDAKLQLSKDTYDDDLDNLLAQIGDQYADLFLAAKNLSDAILLSDILRVNTEITKAPLSASMIKRYDEHHQDLTLLKALVRQQLPEKYKEIFFDQSKNGYAGYIDGGASQEEFYKFIKPILEKMDGTEELLVKLNREDLLRKQRTFDNGSIPHQIHLGELHAILRRQEDFYPFLKDNREKIEKILTFRIPYYVGPLARGNSRFAWMTRKSEETITPWNFEEVVDKGASAQSFIERMTNFDKNLPNEKVLPKHSLLYEYFTVYNELTKVKYVTEGMRKPAFLSGEQKKAIVDLLFKTNRKVTVKQLKEDYFKKIECFDSVEISGVEDRFNASLGTYHDLLKIIKDKDFLDNEENEDILEDIVLTLTLFEDREMIEERLKTYAHLFDDKVMKQLKRRRYTGWGRLSRKLINGIRDKQSGKTILDFLKSDGFANRNFMQLIHDDSLTFKEDIQKAQVSGQGDSLHEHIANLAGSPAIKKGILQTVKVVDELVKVMGRHKPENIVIEMARENQTTQKGQKNSRERMKRIEEGIKELGSQILKEHPVENTQLQNEKLYLYYLQNGRDMYVDQELDINRLSDYDVDHIVPQSFLKDDSIDNKVLTRSDKARGKSDNVPSEEVVKKMKNYWRQLLNAKLITQRKFDNLTKAERGGLSELDKAGFIKRQLVETRQITKHVAQILDSRMNTKYDENDKLIREVKVITLKSKLVSDFRKDFQFYKVREINNYHHAHDAYLNAVVGTALIKKYPKLESEFVYGDYKVYDVRKMIAKSEQEIGKATAKYFFYSNIMNFFKTEITLANGEIRKRPLIETNGETGEIVWDKGRDFATVRKVLSMPQVNIVKKTEVQTGGFSKESILPKRNSDKLIARKKDWDPKKYGGFDSPTVAYSVLVVAKVEKGKSKKLKSVKELLGITIMERSSFEKNPIDFLEAKGYKEVKKDLIIKLPKYSLFELENGRKRMLASAGELQKGNELALPSKYVNFLYLASHYEKLKGSPEDNEQKQLFVEQHKHYLDEIIEQISEFSKRVILADANLDKVLSAYNKHRDKPIREQAENIIHLFTLTNLGAPAAFKYFDTTIDRKRYTSTKEVLDATLIHQSITGLYETRIDLSQLGGDGGEAAAKGSSGGSGGTLNIEDEHRLHETSKEPDVSLGSTWLSDFPQAWAETGGMGLAVRQAPLIIPLKATSTPVSIKQYPMSQEARLGIKPHIQRLLDQGILVPCQSPWNTPLLPVKKPGTNDYRPVQDLREVNKRVEDIHPTVPNPYNLLSGLPPSHQWYTVLDLKDAFFCLRLHPTSQPLFAFEWRDPEMGISGQLTWTRLPQGFKNSPTLFDEALHRDLADFRIQHPDLILLQYVDDLLLAATSELDCQQGTRALLQTLGNLGYRASAKKAQICQKQVKYLGYLLKEGQRWLTEARKETVMGQPTPKTPRQLREFLGTAGFCRLWIPGFAEMAAPLYPLTKTGTLFNWGPDQQKAYQEIKQALLTAPALGLPDLTKPFELFVDEKQGYAKGVLTQKLGPWRRPVAYLSKKLDPVAAGWPPCLRMVAAIAVLTKDAGKLTMGQPLVILAPHAVEALVKQPPDRWLSNARMTHYQALLLDTDRVQFGPVVALNPATLLPLPEEGLQHNCLDILAEAHGTRPDLTDQPLPDADHTWYTDGSSLLQEGQRKAGAAVTTETEVIWAKALPAGTSAQRAELIALTQALKMAEGKKLNVYTDSRYAFATAHIHGEIYRRRGLLTSEGKEIKNKDEILALLKALFLPKRLSIIHCPGHQKGHSAEARGNRMADQAARKAAITETPDTSTLLAGKRTADGSEFEKRTADGSEFESPKKKAKVE

SEQ ID NO: 7117 - protein, 2090 aa, synthetic construct
MPAAKRVKLDGGDKKYSIGLDIGTNSVGWAVITDEYKVPSKKFKVLGNTDRHSIKKNLIGALLFDSGETAEATRLKRTARRRYTRRKNRICYLQEIFSNEMAKVDDSFFHRLEESFLVEEDKKHERHPIFGNIVDEVAYHEKYPTIYHLRKKLVDSTDKADLRLIYLALAHMIKFRGHFLIEGDLNPDNSDVDKLFIQLVQTYNQLFEENPINASGVDAKAILSARLSKSRRLENLIAQLPGEKKNGLFGNLIALSLGLTPNFKSNFDLAEDAKLQLSKDTYDDDLDNLLAQIGDQYADLFLAAKNLSDAILLSDILRVNTEITKAPLSASMIKRYDEHHQDLTLLKALVRQQLPEKYKEIFFDQSKNGYAGYIDGGASQEEFYKFIKPILEKMDGTEELLVKLNREDLLRKQRTFDNGSIPHQIHLGELHAILRRQEDFYPFLKDNREKIEKILTFRIPYYVGPLARGNSRFAWMTRKSEETITPWNFEEVVDKGASAQSFIERMTNFDKNLPNEKVLPKHSLLYEYFTVYNELTKVKYVTEGMRKPAFLSGEQKKAIVDLLFKTNRKVTVKQLKEDYFKKIECFDSVEISGVEDRFNASLGTYHDLLKIIKDKDFLDNEENEDILEDIVLTLTLFEDREMIEERLKTYAHLFDDKVMKQLKRRRYTGWGRLSRKLINGIRDKQSGKTILDFLKSDGFANRNFMQLIHDDSLTFKEDIQKAQVSGQGDSLHEHIANLAGSPAIKKGILQTVKVVDELVKVMGRHKPENIVIEMARENQTTQKGQKNSRERMKRIEEGIKELGSQILKEHPVENTQLQNEKLYLYYLQNGRDMYVDQELDINRLSDYDVDHIVPQSFLKDDSIDNKVLTRSDKARGKSDNVPSEEVVKKMKNYWRQLLNAKLITQRKFDNLTKAERGGLSELDKAGFIKRQLVETRQITKHVAQILDSRMNTKYDENDKLIREVKVITLKSKLVSDFRKDFQFYKVREINNYHHAHDAYLNAVVGTALIKKYPKLESEFVYGDYKVYDVRKMIAKSEQEIGKATAKYFFYSNIMNFFKTEITLANGEIRKRPLIETNGETGEIVWDKGRDFATVRKVLSMPQVNIVKKTEVQTGGFSKESILPKRNSDKLIARKKDWDPKKYGGFDSPTVAYSVLVVAKVEKGKSKKLKSVKELLGITIMERSSFEKNPIDFLEAKGYKEVKKDLIIKLPKYSLFELENGRKRMLASAGELQKGNELALPSKYVNFLYLASHYEKLKGSPEDNEQKQLFVEQHKHYLDEIIEQISEFSKRVILADANLDKVLSAYNKHRDKPIREQAENIIHLFTLTNLGAPAAFKYFDTTIDRKRYTSTKEVLDATLIHQSITGLYETRIDLSQLGGDGGEAAAKGSSGGSGGTLQLDDEYRLYSPLVKPDQNIQFWLEQFPQAWAETAGMGLAKQVPPQVIQLKASATPVSVRQYPLSKEAQEGIRPHVQRLIQQGILVPVQSPWNTPLLPVRKPGTNDYRPVQDLREVNKRVQDIHPTVPNPYNLLCALPPQRSWYTVLDLKDAFFCLRLHPTSQPLFAFEWRDPGTGRTGQLTWTRLPQGFKNSPTIFDEALHRDLANFRIQHPQVTLLQYVDDLLLAGATKQDCLEGTKALLLELSDLGYRASAKKAQICRREVTYLGYSLRDGQRWLTEARKKTVVQIPAPTTAKQVREFLGTAGFCRLWIPGFATLAAPLYPLTKEKGEFSWAPEHQKAFDAIKKALLSAPALALPDVTKPFTLYVDERKGVARGVLTQTLGPWRRPVAYLSKKLDPVASGWPVCLKAIAAVAILVKDADKLTLGQNITVIAPHALENIVRQPPDRWMTNARMTHYQSLLLTERVTFAPPAALNPATLLPEETDEPVTHDCHQLLIEETGVRKDLTDIPLTGEVLTWFTDGSSYVVEGKRMAGAAVVDGTRTIWASSLPEGTSAQKAELMALTQALRLAEGKSINIYTDSRYAFATAHVHGAIYKQRGLLTSAGREIKNKEEILSLLEALHLPKRLAIIHCPGHQKAKDPISRGNQMADRVAKQAAQGVNLLAGKRTADGSEFEKRTADGSEFESPKKKAKVE

SEQ ID NO: 7118 - protein, 2176 aa, synthetic construct
MPAAKRVKLDGGDKKYSIGLDIGTNSVGWAVITDEYKVPSKKFKVLGNTDRHSIKKNLIGALLFDSGETAEATRLKRTARRRYTRRKNRICYLQEIFSNEMAKVDDSFFHRLEESFLVEEDKKHERHPIFGNIVDEVAYHEKYPTIYHLRKKLVDSTDKADLRLIYLALAHMIKFRGHFLIEGDLNPDNSDVDKLFIQLVQTYNQLFEENPINASGVDAKAILSARLSKSRRLENLIAQLPGEKKNGLFGNLIALSLGLTPNFKSNFDLAEDAKLQLSKDTYDDDLDNLLAQIGDQYADLFLAAKNLSDAILLSDILRVNTEITKAPLSASMIKRYDEHHQDLTLLKALVRQQLPEKYKEIFFDQSKNGYAGYIDGGASQEEFYKFIKPILEKMDGTEELLVKLNREDLLRKQRTFDNGSIPHQIHLGELHAILRRQEDFYPFLKDNREKIEKILTFRIPYYVGPLARGNSRFAWMTRKSEETITPWNFEEVVDKGASAQSFIERMTNFDKNLPNEKVLPKHSLLYEYFTVYNELTKVKYVTEGMRKPAFLSGEQKKAIVDLLFKTNRKVTVKQLKEDYFKKIECFDSVEISGVEDRFNASLGTYHDLLKIIKDKDFLDNEENEDILEDIVLTLTLFEDREMIEERLKTYAHLFDDKVMKQLKRRRYTGWGRLSRKLINGIRDKQSGKTILDFLKSDGFANRNFMQLIHDDSLTFKEDIQKAQVSGQGDSLHEHIANLAGSPAIKKGILQTVKVVDELVKVMGRHKPENIVIEMARENQTTQKGQKNSRERMKRIEEGIKELGSQILKEHPVENTQLQNEKLYLYYLQNGRDMYVDQELDINRLSDYDVDHIVPQSFLKDDSIDNKVLTRSDKARGKSDNVPSEEVVKKMKNYWRQLLNAKLITQRKFDNLTKAERGGLSELDKAGFIKRQLVETRQITKHVAQILDSRMNTKYDENDKLIREVKVITLKSKLVSDFRKDFQFYKVREINNYHHAHDAYLNAVVGTALIKKYPKLESEFVYGDYKVYDVRKMIAKSEQEIGKATAKYFFYSNIMNFFKTEITLANGEIRKRPLIETNGETGEIVWDKGRDFATVRKVLSMPQVNIVKKTEVQTGGFSKESILPKRNSDKLIARKKDWDPKKYGGFDSPTVAYSVLVVAKVEKGKSKKLKSVKELLGITIMERSSFEKNPIDFLEAKGYKEVKKDLIIKLPKYSLFELENGRKRMLASAGELQKGNELALPSKYVNFLYLASHYEKLKGSPEDNEQKQLFVEQHKHYLDEIIEQISEFSKRVILADANLDKVLSAYNKHRDKPIREQAENIIHLFTLTNLGAPAAFKYFDTTIDRKRYTSTKEVLDATLIHQSITGLYETRIDLSQLGGDGGEAAAKGSSGGSGGMDPLQLLQPLEAEIKGTKLKAHWNSGATITCVPQAFLEEEVPIKNIWIKTIHGEKEQPVYYLTFKIQGRKVEAEVISSPYDYILVSPSDIPWLMKKPLQLTTLVPLQEYEERLLKQTMLTGSYKEKLQSLFLKYDALWQHWENQVGHRRIKPHHIATGTVNPRPQKQYPINPKAKASIQTVINDLLKQGVLIQQNSIMNTPVYPVPKPDGKWRMVLDYREVNKTIPLIAAQNQHSAGILSSIFRGKYKTTLDLSNGFWAHSITPESYWLTAFTWLGQQYCWTRLPQGFLNSPALFNADVVDLLKEVPNVQVYVDDIYISHDDPREHLEQLEKVFSLLLNAGYVVSLKKSEIAQHEVEFLGFNITKEGRGLTETFKQKLLNITPPRDLKQLQSILGLLNFARNFIPNFSELVKPLYNIIATAPGKYITWTTDNSQQLQNIISMLNSAENLEERNPEVRLIMKVNTSPSAGYIRFYNEFAKRPIMYLNYVYTKAEVKFTNTEKLLTTIHKGLIKALDLGMGQEILVYSPIVSMTKIQKTPLPERKALPIRWITWMSYLEDPRIQFHYDKTLPELQQVPTVTDDIIAKIKHPSEFSMVFYTDGSAIKHPNVNKSHNAGMGIAQVQFKPEFTVINTWSIPLGDHTAQLAEVAAVEFACKKALKIDGPVLIVTDSFYVAESVNKELPYWQSNGFFNNKKKPLKHVSKWKSIADCIQLKPDIIIIHEKGHQPTASTFHTEGNNLADKLATQGSYVVNAGKRTADGSEFEKRTADGSEFESPKKKAKVE

SEQ ID NO: 7119 - protein, 2094 aa, synthetic construct
MPAAKRVKLDGGDKKYSIGLDIGTNSVGWAVITDEYKVPSKKFKVLGNTDRHSIKKNLIGALLFDSGETAEATRLKRTARRRYTRRKNRICYLQEIFSNEMAKVDDSFFHRLEESFLVEEDKKHERHPIFGNIVDEVAYHEKYPTIYHLRKKLVDSTDKADLRLIYLALAHMIKFRGHFLIEGDLNPDNSDVDKLFIQLVQTYNQLFEENPINASGVDAKAILSARLSKSRRLENLIAQLPGEKKNGLFGNLIALSLGLTPNFKSNFDLAEDAKLQLSKDTYDDDLDNLLAQIGDQYADLFLAAKNLSDAILLSDILRVNTEITKAPLSASMIKRYDEHHQDLTLLKALVRQQLPEKYKEIFFDQSKNGYAGYIDGGASQEEFYKFIKPILEKMDGTEELLVKLNREDLLRKQRTFDNGSIPHQIHLGELHAILRRQEDFYPFLKDNREKIEKILTFRIPYYVGPLARGNSRFAWMTRKSEETITPWNFEEVVDKGASAQSFIERMTNFDKNLPNEKVLPKHSLLYEYFTVYNELTKVKYVTEGMRKPAFLSGEQKKAIVDLLFKTNRKVTVKQLKEDYFKKIECFDSVEISGVEDRFNASLGTYHDLLKIIKDKDFLDNEENEDILEDIVLTLTLFEDREMIEERLKTYAHLFDDKVMKQLKRRRYTGWGRLSRKLINGIRDKQSGKTILDFLKSDGFANRNFMQLIHDDSLTFKEDIQKAQVSGQGDSLHEHIANLAGSPAIKKGILQTVKVVDELVKVMGRHKPENIVIEMARENQTTQKGQKNSRERMKRIEEGIKELGSQILKEHPVENTQLQNEKLYLYYLQNGRDMYVDQELDINRLSDYDVDHIVPQSFLKDDSIDNKVLTRSDKARGKSDNVPSEEVVKKMKNYWRQLLNAKLITQRKFDNLTKAERGGLSELDKAGFIKRQLVETRQITKHVAQILDSRMNTKYDENDKLIREVKVITLKSKLVSDFRKDFQFYKVREINNYHHAHDAYLNAVVGTALIKKYPKLESEFVYGDYKVYDVRKMIAKSEQEIGKATAKYFFYSNIMNFFKTEITLANGEIRKRPLIETNGETGEIVWDKGRDFATVRKVLSMPQVNIVKKTEVQTGGFSKESILPKRNSDKLIARKKDWDPKKYGGFDSPTVAYSVLVVAKVEKGKSKKLKSVKELLGITIMERSSFEKNPIDFLEAKGYKEVKKDLIIKLPKYSLFELENGRKRMLASAGELQKGNELALPSKYVNFLYLASHYEKLKGSPEDNEQKQLFVEQHKHYLDEIIEQISEFSKRVILADANLDKVLSAYNKHRDKPIREQAENIIHLFTLTNLGAPAAFKYFDTTIDRKRYTSTKEVLDATLIHQSITGLYETRIDLSQLGGDGGEAAAKGSSGGSGGVLNLEEEYRLHEKPVPSSIDPSWLQLFPTVWAERAGMGLANQVPPVVVELRSGASPVAVRQYPMSKEAREGIRPHIQRFLDLGVLVPCQSPWNTPLLPVKKPGTNDYRPVQDLREINKRVQDIHPTVPNPYNLLSSLPPSHTWYSVLDLKDAFFCLKLHPNSQPLFAFEWRDPEKGNTGQLTWTRLPQGFKNSPTLFDEALHRDLAPFRALNPQVVLLQYVDDLLVAAPTYRDCKEGTQKLLQELSKLGYRVSAKKAQLCQKEVTYLGYLLKEGKRWLTPARKATVMKIPPPTTPRQVREFLGTAGFCRLWIPGFASLAAPLYPLTKESIPFIWTEEHQKAFDRIKEALLSAPALALPDLTKPFTLYVDERAGVARGVLTQTLGPWRRPVAYLSKKLDPVASGWPTCLKAVAAVALLLKDADKLTLGQNVTVIASHSLESIVRQPPDRWMTNARMTHYQSLLLNERVSFAPPAVLNPATLLPVESEATPVHRCSEILAEETGTRRDLKDQPLPGVPAWYTDGSSFIAEGKRRAGAAIVDGKRTVWASSLPEGTSAQKAELVALTQALRLAEGKDINIYTDSRYAFATAHIHGAIYKQRGLLTSAGKDIKNKEEILALLEAIHLPKRVAIIHCPGHQKGNDPVATGNRRADEAAKQAALSTRVLAETTKPAGKRTADGSEFEKRTADGSEFESPKKKAKVE

SEQ ID NO: 7120 - protein, 2094 aa, synthetic construct
MPAAKRVKLDGGDKKYSIGLDIGTNSVGWAVITDEYKVPSKKFKVLGNTDRHSIKKNLIGALLFDSGETAEATRLKRTARRRYTRRKNRICYLQEIFSNEMAKVDDSFFHRLEESFLVEEDKKHERHPIFGNIVDEVAYHEKYPTIYHLRKKLVDSTDKADLRLIYLALAHMIKFRGHFLIEGDLNPDNSDVDKLFIQLVQTYNQLFEENPINASGVDAKAILSARLSKSRRLENLIAQLPGEKKNGLFGNLIALSLGLTPNFKSNFDLAEDAKLQLSKDTYDDDLDNLLAQIGDQYADLFLAAKNLSDAILLSDILRVNTEITKAPLSASMIKRYDEHHQDLTLLKALVRQQLPEKYKEIFFDQSKNGYAGYIDGGASQEEFYKFIKPILEKMDGTEELLVKLNREDLLRKQRTFDNGSIPHQIHLGELHAILRRQEDFYPFLKDNREKIEKILTFRIPYYVGPLARGNSRFAWMTRKSEETITPWNFEEVVDKGASAQSFIERMTNFDKNLPNEKVLPKHSLLYEYFTVYNELTKVKYVTEGMRKPAFLSGEQKKAIVDLLFKTNRKVTVKQLKEDYFKKIECFDSVEISGVEDRFNASLGTYHDLLKIIKDKDFLDNEENEDILEDIVLTLTLFEDREMIEERLKTYAHLFDDKVMKQLKRRRYTGWGRLSRKLINGIRDKQSGKTILDFLKSDGFANRNFMQLIHDDSLTFKEDIQKAQVSGQGDSLHEHIANLAGSPAIKKGILQTVKVVDELVKVMGRHKPENIVIEMARENQTTQKGQKNSRERMKRIEEGIKELGSQILKEHPVENTQLQNEKLYLYYLQNGRDMYVDQELDINRLSDYDVDHIVPQSFLKDDSIDNKVLTRSDKARGKSDNVPSEEVVKKMKNYWRQLLNAKLITQRKFDNLTKAERGGLSELDKAGFIKRQLVETRQITKHVAQILDSRMNTKYDENDKLIREVKVITLKSKLVSDFRKDFQFYKVREINNYHHAHDAYLNAVVGTALIKKYPKLESEFVYGDYKVYDVRKMIAKSEQEIGKATAKYFFYSNIMNFFKTEITLANGEIRKRPLIETNGETGEIVWDKGRDFATVRKVLSMPQVNIVKKTEVQTGGFSKESILPKRNSDKLIARKKDWDPKKYGGFDSPTVAYSVLVVAKVEKGKSKKLKSVKELLGITIMERSSFEKNPIDFLEAKGYKEVKKDLIIKLPKYSLFELENGRKRMLASAGELQKGNELALPSKYVNFLYLASHYEKLKGSPEDNEQKQLFVEQHKHYLDEIIEQISEFSKRVILADANLDKVLSAYNKHRDKPIREQAENIIHLFTLTNLGAPAAFKYFDTTIDRKRYTSTKEVLDATLIHQSITGLYETRIDLSQLGGDGGEAAAKGSSGGSGGVLNLEEEYRLHEKPVPSSIDPSWLQLFPTVWAERAGMGLANQVPPVVVELRSGASPVAVRQYPMSKEAREGIRPHIQRFLDLGVLVPCQSPWNTPLLPVKKPGTNDYRPVQDLREINKRVQDIHPTVPNPYNLLSSLPPSHTWYSVLDLKDAFFCLKLHPNSQPLFAFEWRDPEKGNTGQLTWTRLPQGFKNSPTLFNEALHRDLAPFRALNPQVVLLQYVDDLLVAAPTYRDCKEGTQKLLQELSKLGYRVSAKKAQLCQKEVTYLGYLLKEGKRWLTPARKATVMKIPPPTTPRQVREFLGTAGFCRLWIPGFASLAAPLYPLTKPSIPFIWTEEHQKAFDRIKEALLSAPALALPDLTKPFTLYVDERAGVARGVLTQTLGPWRRPVAYLSKKLDPVASGWPTCLKAVAAVALLLKDADKLTLGQNVTVIASHSLESIVRQPPDRWMTNARMTHYQSLLLNERVSFAPPAVLNPATLLPVESEATPVHRCSEILAEETGTRRDLKDQPLPGVPAWYTDGSSFIAEGKRRAGAAIVDGKRTVWASSLPEGTSAQKAELVALTQALRLAEGKDINIYTDSRYAFATAHIHGAIYKQRGWLTSAGKDIKNKEEILALLEAIHLPKRVAIIHCPGHQKGNDPVATGNRRADEAAKQAALSTRVLAETTKPAGKRTADGSEFEKRTADGSEFESPKKKAKVE

SEQ ID NO: 7121 - protein, 2096 aa, synthetic construct; identical to SEQ ID NO: 4524

SEQ ID NO: 7122 - protein, 2096 aa, synthetic construct
MPAAKRVKLDGGDKKYSIGLDIGTNSVGWAVITDEYKVPSKKFKVLGNTDRHSIKKNLIGALLFDSGETAEATRLKRTARRRYTRRKNRICYLQEIFSNEMAKVDDSFFHRLEESFLVEEDKKHERHPIFGNIVDEVAYHEKYPTIYHLRKKLVDSTDKADLRLIYLALAHMIKFRGHFLIEGDLNPDNSDVDKLFIQLVQTYNQLFEENPINASGVDAKAILSARLSKSRRLENLIAQLPGEKKNGLFGNLIALSLGLTPNFKSNFDLAEDAKLQLSKDTYDDDLDNLLAQIGDQYADLFLAAKNLSDAILLSDILRVNTEITKAPLSASMIKRYDEHHQDLTLLKALVRQQLPEKYKEIFFDQSKNGYAGYIDGGASQEEFYKFIKPILEKMDGTEELLVKLNREDLLRKQRTFDNGSIPHQIHLGELHAILRRQEDFYPFLKDNREKIEKILTFRIPYYVGPLARGNSRFAWMTRKSEETITPWNFEEVVDKGASAQSFIERMTNFDKNLPNEKVLPKHSLLYEYFTVYNELTKVKYVTEGMRKPAFLSGEQKKAIVDLLFKTNRKVTVKQLKEDYFKKIECFDSVEISGVEDRFNASLGTYHDLLKIIKDKDFLDNEENEDILEDIVLTLTLFEDREMIEERLKTYAHLFDDKVMKQLKRRRYTGWGRLSRKLINGIRDKQSGKTILDFLKSDGFANRNFMQLIHDDSLTFKEDIQKAQVSGQGDSLHEHIANLAGSPAIKKGILQTVKVVDELVKVMGRHKPENIVIEMARENQTTQKGQKNSRERMKRIEEGIKELGSQILKEHPVENTQLQNEKLYLYYLQNGRDMYVDQELDINRLSDYDVDHIVPQSFLKDDSIDNKVLTRSDKARGKSDNVPSEEVVKKMKNYWRQLLNAKLITQRKFDNLTKAERGGLSELDKAGFIKRQLVETRQITKHVAQILDSRMNTKYDENDKLIREVKVITLKSKLVSDFRKDFQFYKVREINNYHHAHDAYLNAVVGTALIKKYPKLESEFVYGDYKVYDVRKMIAKSEQEIGKATAKYFFYSNIMNFFKTEITLANGEIRKRPLIETNGETGEIVWDKGRDFATVRKVLSMPQVNIVKKTEVQTGGFSKESILPKRNSDKLIARKKDWDPKKYGGFDSPTVAYSVLVVAKVEKGKSKKLKSVKELLGITIMERSSFEKNPIDFLEAKGYKEVKKDLIIKLPKYSLFELENGRKRMLASAGELQKGNELALPSKYVNFLYLASHYEKLKGSPEDNEQKQLFVEQHKHYLDEIIEQISEFSKRVILADANLDKVLSAYNKHRDKPIREQAENIIHLFTLTNLGAPAAFKYFDTTIDRKRYTSTKEVLDATLIHQSITGLYETRIDLSQLGGDGGGGSGSSPAPGGTAPLEEEYRLFLEAPIQNVTLLEQWKREIPKVWAEINPPGLASTQAPIHVQLLSTALPVRVRQYPITLEAKRSLRETIRKFRAAGILRPVHSPWNTPLLPVRKSGTSEYRMVQDLREVNKRVETIHPTVPNPYTLLSLLPPDRIWYSVLDLKDAFFCIPLAPESQLIFAFEWADAEEGESGQLTWTRLPQGFKNSPTLFNEALNRDLQGFRLDHPSVSLLQYVDDLLIAADTQAACLSATRDLLMTLAELGYRVSGKKAQLCQEEVTYLGFKIHKGSRSLSNSRTQAILQIPVPKTKRQVREFLGTIGYCRLWIPGFAELAQPLYAATRPGNDPLVWGEKEEEAFQSLKLALTQPPALALPSLDKPFQLFVEETSGAAKGVLTQALGPWKRPVAYLSKRLDPVAAGWPRCLRAIAAAALLTREASKLTFGQDIEITSSHNLESLLRSPPDKWLTNARITQYQVLLLDPPRVRFKQTAALNPATLLPETDDTLPIHHCLDTLDSLTSTRPDLTDQPLAQAEATLFTDGSSYIRDGKRYAGAAVVTLDSVIWAEPLPIGTSAQKAELIALTKALEWSKDKSVNIYTDSRYAFATLHVHGMIYRERGWLTAGGKAIKNAPEILALLTAVWLPKRVAVMHCKGHQKDDAPTSTGNRRADEVAREVAIRPLSTQATISAGKRTADGSEFEKRTADGSEFESPKKKAKVE

SEQ ID NO: 7123 - protein, 2096 aa, synthetic construct
MPAAKRVKLDGGDKKYSIGLDIGTNSVGWAVITDEYKVPSKKFKVLGNTDRHSIKKNLIGALLFDSGETAEATRLKRTARRRYTRRKNRICYLQEIFSNEMAKVDDSFFHRLEESFLVEEDKKHERHPIFGNIVDEVAYHEKYPTIYHLRKKLVDSTDKADLRLIYLALAHMIKFRGHFLIEGDLNPDNSDVDKLFIQLVQTYNQLFEENPINASGVDAKAILSARLSKSRRLENLIAQLPGEKKNGLFGNLIALSLGLTPNFKSNFDLAEDAKLQLSKDTYDDDLDNLLAQIGDQYADLFLAAKNLSDAILLSDILRVNTEITKAPLSASMIKRYDEHHQDLTLLKALVRQQLPEKYKEIFFDQSKNGYAGYIDGGASQEEFYKFIKPILEKMDGTEELLVKLNREDLLRKQRTFDNGSIPHQIHLGELHAILRRQEDFYPFLKDNREKIEKILTFRIPYYVGPLARGNSRFAWMTRKSEETITPWNFEEVVDKGASAQSFIERMTNFDKNLPNEKVLPKHSLLYEYFTVYNELTKVKYVTEGMRKPAFLSGEQKKAIVDLLFKTNRKVTVKQLKEDYFKKIECFDSVEISGVEDRFNASLGTYHDLLKIIKDKDFLDNEENEDILEDIVLTLTLFEDREMIEERLKTYAHLFDDKVMKQLKRRRYTGWGRLSRKLINGIRDKQSGKTILDFLKSDGFANRNFMQLIHDDSLTFKEDIQKAQVSGQGDSLHEHIANLAGSPAIKKGILQTVKVVDELVKVMGRHKPENIVIEMARENQTTQKGQKNSRERMKRIEEGIKELGSQILKEHPVENTQLQNEKLYLYYLQNGRDMYVDQELDINRLSDYDVDHIVPQSFLKDDSIDNKVLTRSDKARGKSDNVPSEEVVKKMKNYWRQLLNAKLITQRKFDNLTKAERGGLSELDKAGFIKRQLVETRQITKHVAQILDSRMNTKYDENDKLIREVKVITLKSKLVSDFRKDFQFYKVREINNYHHAHDAYLNAVVGTALIKKYPKLESEFVYGDYKVYDVRKMIAKSEQEIGKATAKYFFYSNIMNFFKTEITLANGEIRKRPLIETNGETGEIVWDKGRDFATVRKVLSMPQVNIVKKTEVQTGGFSKESILPKRNSDKLIARKKDWDPKKYGGFDSPTVAYSVLVVAKVEKGKSKKLKSVKELLGITIMERSSFEKNPIDFLEAKGYKEVKKDLIIKLPKYSLFELENGRKRMLASAGELQKGNELALPSKYVNFLYLASHYEKLKGSPEDNEQKQLFVEQHKHYLDEIIEQISEFSKRVILADANLDKVLSAYNKHRDKPIREQAENIIHLFTLTNLGAPAAFKYFDTTIDRKRYTSTKEVLDATLIHQSITGLYETRIDLSQLGGDGGGGSGSSPAPGGTAPLEEEYRLFLEAPIQNVTLLEQWKREIPKVWAEINPPGLASTQAPIHVQLLSTALPVRVRQYPITLEAKRSLRETIRKFRAAGILRPVHSPWNTPLLPVRKSGTSEYRMVQDLREVNKRVETIHPTVPNPYTLLSLLPPDRIWYSVLDLKDAFFCIPLAPESQLIFAFEWADAEEGESGQLTWTRLPQGFKNSPTLFNEALNRDLQGFRLDHPSVSLLQYVDDLLIAADTQAACLSATRDLLMTLAELGYRVSGKKAQLCQEEVTYLGFKIHKGSRSLSNSRTQAILQIPVPKTKRQVREFLGKIGYCRLFIPGFAELAQPLYAATRPGNDPLVWGEKEEEAFQSLKLALTQPPALALPSLDKPFQLFVEETSGAAKGVLTQALGPWKRPVAYLSKRLDPVAAGWPRCLRAIAAAALLTREASKLTFGQDIEITSSHNLESLLRSPPDKWLTNARITQYQVLLLDPPRVRFKQTAALNPATLLPETDDTLPIHHCLDTLDSLTSTRPDLTDQPLAQAEATLFTDGSSYIRDGKRYAGAAVVTLDSVIWAEPLPIGTSAQKAELIALTKALEWSKDKSVNIYTDSRYAFATLHVHGMIYRERGWLTAGGKAIKNAPEILALLTAVWLPKRVAVMHCKGHQKDDAPTSTGNRRADEVAREVAIRPLSTQATISAGKRTADGSEFEKRTADGSEFESPKKKAKVE

SEQ ID NO: 7124 - protein, 2093 aa, synthetic construct
MPAAKRVKLDGGDKKYSIGLDIGTNSVGWAVITDEYKVPSKKFKVLGNTDRHSIKKNLIGALLFDSGETAEATRLKRTARRRYTRRKNRICYLQEIFSNEMAKVDDSFFHRLEESFLVEEDKKHERHPIFGNIVDEVAYHEKYPTIYHLRKKLVDSTDKADLRLIYLALAHMIKFRGHFLIEGDLNPDNSDVDKLFIQLVQTYNQLFEENPINASGVDAKAILSARLSKSRRLENLIAQLPGEKKNGLFGNLIALSLGLTPNFKSNFDLAEDAKLQLSKDTYDDDLDNLLAQIGDQYADLFLAAKNLSDAILLSDILRVNTEITKAPLSASMIKRYDEHHQDLTLLKALVRQQLPEKYKEIFFDQSKNGYAGYIDGGASQEEFYKFIKPILEKMDGTEELLVKLNREDLLRKQRTFDNGSIPHQIHLGELHAILRRQEDFYPFLKDNREKIEKILTFRIPYYVGPLARGNSRFAWMTRKSEETITPWNFEEVVDKGASAQSFIERMTNFDKNLPNEKVLPKHSLLYEYFTVYNELTKVKYVTEGMRKPAFLSGEQKKAIVDLLFKTNRKVTVKQLKEDYFKKIECFDSVEISGVEDRFNASLGTYHDLLKIIKDKDFLDNEENEDILEDIVLTLTLFEDREMIEERLKTYAHLFDDKVMKQLKRRRYTGWGRLSRKLINGIRDKQSGKTILDFLKSDGFANRNFMQLIHDDSLTFKEDIQKAQVSGQGDSLHEHIANLAGSPAIKKGILQTVKVVDELVKVMGRHKPENIVIEMARENQTTQKGQKNSRERMKRIEEGIKELGSQILKEHPVENTQLQNEKLYLYYLQNGRDMYVDQELDINRLSDYDVDHIVPQSFLKDDSIDNKVLTRSDKARGKSDNVPSEEVVKKMKNYWRQLLNAKLITQRKFDNLTKAERGGLSELDKAGFIKRQLVETRQITKHVAQILDSRMNTKYDENDKLIREVKVITLKSKLVSDFRKDFQFYKVREINNYHHAHDAYLNAVVGTALIKKYPKLESEFVYGDYKVYDVRKMIAKSEQEIGKATAKYFFYSNIMNFFKTEITLANGEIRKRPLIETNGETGEIVWDKGRDFATVRKVLSMPQVNIVKKTEVQTGGFSKESILPKRNSDKLIARKKDWDPKKYGGFDSPTVAYSVLVVAKVEKGKSKKLKSVKELLGITIMERSSFEKNPIDFLEAKGYKEVKKDLIIKLPKYSLFELENGRKRMLASAGELQKGNELALPSKYVNFLYLASHYEKLKGSPEDNEQKQLFVEQHKHYLDEIIEQISEFSKRVILADANLDKVLSAYNKHRDKPIREQAENIIHLFTLTNLGAPAAFKYFDTTIDRKRYTSTKEVLDATLIHQSITGLYETRIDLSQLGGDGGGGSGSSPAPGGTLQLEEEYRLFEPESTQKQEMDIWLKNFPQAWAETGGMGTAHCQAPVLIQLKATATPISIRQYPMPHEAYQGIKPHIRRMLDQGILKPCQSPWNTPLLPVKKPGTEDYRPVQDLREVNKRVEDIHPTVPNPYNLLSTLPPSHPWYTVLDLKDAFFCLRLHSESQLLFAFEWRDPEIGLSGQLTWTRLPQGFKNSPTLFNEALHSDLADFRVRYPALVLLQYVDDLLLAAATRTECLEGTKALLETLGNKGYRASAKKAQICLQEVTYLGYSLKDGQRWLTKARKEAILSIPVPKNSRQVREFLGTAGYCRLWIPGFAELAAPLYPLTRPGTLFQWGTEQQLAFEDIKKALLSSPALGLPDITKPFELFIDENSGFAKGVLVQKLGPWKRPVAYLSKKLDTVASGWPPCLRMVAAIAILVKDAGKLTLGQPLTILTSHPVEALVRQPPNKWLSNARMTHYQAMLLDAERVHFGPTVSLNPATLLPLPSGGNHHDCLQILAETHGTRPDLTDQPLPDADLTWYTDGSSFIRNGEREAGAAVTTESEVIWAAPLPPGTSAQRAELIALTQALKMAEGKKLTVYTDSRYAFATTHVHGEIYRRRGWLTSEGKEIKNKNEILALLEALFLPKRLSIIHCPGHQKGDSPQAKGNRLADDTAKKAATETHSSLTVLPAGKRTADGSEFEKRTADGSEFESPKKKAKVE

SEQ ID NO: 7125 - protein, 2085 aa, synthetic construct
MPAAKRVKLDGGDKKYSIGLDIGTNSVGWAVITDEYKVPSKKFKVLGNTDRHSIKKNLIGALLFDSGETAEATRLKRTARRRYTRRKNRICYLQEIFSNEMAKVDDSFFHRLEESFLVEEDKKHERHPIFGNIVDEVAYHEKYPTIYHLRKKLVDSTDKADLRLIYLALAHMIKFRGHFLIEGDLNPDNSDVDKLFIQLVQTYNQLFEENPINASGVDAKAILSARLSKSRRLENLIAQLPGEKKNGLFGNLIALSLGLTPNFKSNFDLAEDAKLQLSKDTYDDDLDNLLAQIGDQYADLFLAAKNLSDAILLSDILRVNTEITKAPLSASMIKRYDEHHQDLTLLKALVRQQLPEKYKEIFFDQSKNGYAGYIDGGASQEEFYKFIKPILEKMDGTEELLVKLNREDLLRKQRTFDNGSIPHQIHLGELHAILRRQEDFYPFLKDNREKIEKILTFRIPYYVGPLARGNSRFAWMTRKSEETITPWNFEEVVDKGASAQSFIERMTNFDKNLPNEKVLPKHSLLYEYFTVYNELTKVKYVTEGMRKPAFLSGEQKKAIVDLLFKTNRKVTVKQLKEDYFKKIECFDSVEISGVEDRFNASLGTYHDLLKIIKDKDFLDNEENEDILEDIVLTLTLFEDREMIEERLKTYAHLFDDKVMKQLKRRRYTGWGRLSRKLINGIRDKQSGKTILDFLKSDGFANRNFMQLIHDDSLTFKEDIQKAQVSGQGDSLHEHIANLAGSPAIKKGILQTVKVVDELVKVMGRHKPENIVIEMARENQTTQKGQKNSRERMKRIEEGIKELGSQILKEHPVENTQLQNEKLYLYYLQNGRDMYVDQELDINRLSDYDVDHIVPQSFLKDDSIDNKVLTRSDKARGKSDNVPSEEVVKKMKNYWRQLLNAKLITQRKFDNLTKAERGGLSELDKAGFIKRQLVETRQITKHVAQILDSRMNTKYDENDKLIREVKVITLKSKLVSDFRKDFQFYKVREINNYHHAHDAYLNAVVGTALIKKYPKLESEFVYGDYKVYDVRKMIAKSEQEIGKATAKYFFYSNIMNFFKTEITLANGEIRKRPLIETNGETGEIVWDKGRDFATVRKVLSMPQVNIVKKTEVQTGGFSKESILPKRNSDKLIARKKDWDPKKYGGFDSPTVAYSVLVVAKVEKGKSKKLKSVKELLGITIMERSSFEKNPIDFLEAKGYKEVKKDLIIKLPKYSLFELENGRKRMLASAGELQKGNELALPSKYVNFLYLASHYEKLKGSPEDNEQKQLFVEQHKHYLDEIIEQISEFSKRVILADANLDKVLSAYNKHRDKPIREQAENIIHLFTLTNLGAPAAFKYFDTTIDRKRYTSTKEVLDATLIHQSITGLYETRIDLSQLGGDGGGGSGSSPAPGGVPWLTQQPLQLTILVPLQEYQEKILSKTALPEDQKQQLKTLFVKYDNLWQHWENQVGHRKIRPHNIATGDYPPRPQKQYPINPKAKPSIQIVIDDLLKQGVLTPQNSTMNTPVYPVPKPDGRWRMVLDYREVNKTIPLTAAQNQHSAGILATIVRQKYKTTLDLANGFWAHPITPESYWLTAFTWQGKQYCWTRLPQGFLNSPALFNADVVDLLKEIPNVQVYVDDIYLSHDDPKEHVQQLEKVFQILLQAGYVVSLKKSEIGQKTVEFLGFNITKEGRGLTDTFKTKLLNITPPKDLKQLQSILGLLNFARNFIPNFAELVQPLYNLIAPAKGKYIEWSEENTKQLNMVIEALNTASNLEERLPEQRLVIKVNTSPSAGYVRYYNETGKKPIMYLNYVFSKAELKFSMLEKLLTTMHKALIKAMDLAMGQEILVYSPIVSMTKIQKTPLPERKALPIRWITWMTYLEDPRIQFHYDKTLPELKHIPDVYTSSQSPVKHPSQYEGVFYTDGSAIKSPDPTKSNNAGMGIVHATYKPEYQVLNQWSIPLGNHTAQMAEIAAVEFACKKALKIPGPVLVITDSFYVAESANKELPYWKSNGFVNNKKKPLKHISKWKSIAECLSMKPDITIQHEKGISLQIPVFILKGNALADKLATQGSYVVNAGKRTADGSEFEKRTADGSEFESPKKKAKVE

SEQ ID NO: 7126 - protein, 2216 aa, synthetic construct
MPAAKRVKLDGGDKKYSIGLDIGTNSVGWAVITDEYKVPSKKFKVLGNTDRHSIKKNLIGALLFDSGETAEATRLKRTARRRYTRRKNRICYLQEIFSNEMAKVDDSFFHRLEESFLVEEDKKHERHPIFGNIVDEVAYHEKYPTIYHLRKKLVDSTDKADLRLIYLALAHMIKFRGHFLIEGDLNPDNSDVDKLFIQLVQTYNQLFEENPINASGVDAKAILSARLSKSRRLENLIAQLPGEKKNGLFGNLIALSLGLTPNFKSNFDLAEDAKLQLSKDTYDDDLDNLLAQIGDQYADLFLAAKNLSDAILLSDILRVNTEITKAPLSASMIKRYDEHHQDLTLLKALVRQQLPEKYKEIFFDQSKNGYAGYIDGGASQEEFYKFIKPILEKMDGTEELLVKLNREDLLRKQRTFDNGSIPHQIHLGELHAILRRQEDFYPFLKDNREKIEKILTFRIPYYVGPLARGNSRFAWMTRKSEETITPWNFEEVVDKGASAQSFIERMTNFDKNLPNEKVLPKHSLLYEYFTVYNELTKVKYVTEGMRKPAFLSGEQKKAIVDLLFKTNRKVTVKQLKEDYFKKIECFDSVEISGVEDRFNASLGTYHDLLKIIKDKDFLDNEENEDILEDIVLTLTLFEDREMIEERLKTYAHLFDDKVMKQLKRRRYTGWGRLSRKLINGIRDKQSGKTILDFLKSDGFANRNFMQLIHDDSLTFKEDIQKAQVSGQGDSLHEHIANLAGSPAIKKGILQTVKVVDELVKVMGRHKPENIVIEMARENQTTQKGQKNSRERMKRIEEGIKELGSQILKEHPVENTQLQNEKLYLYYLQNGRDMYVDQELDINRLSDYDVDHIVPQSFLKDDSIDNKVLTRSDKARGKSDNVPSEEVVKKMKNYWRQLLNAKLITQRKFDNLTKAERGGLSELDKAGFIKRQLVETRQITKHVAQILDSRMNTKYDENDKLIREVKVITLKSKLVSDFRKDFQFYKVREINNYHHAHDAYLNAVVGTALIKKYPKLESEFVYGDYKVYDVRKMIAKSEQEIGKATAKYFFYSNIMNFFKTEITLANGEIRKRPLIETNGETGEIVWDKGRDFATVRKVLSMPQVNIVKKTEVQTGGFSKESILPKRNSDKLIARKKDWDPKKYGGFDSPTVAYSVLVVAKVEKGKSKKLKSVKELLGITIMERSSFEKNPIDFLEAKGYKEVKKDLIIKLPKYSLFELENGRKRMLASAGELQKGNELALPSKYVNFLYLASHYEKLKGSPEDNEQKQLFVEQHKHYLDEIIEQISEFSKRVILADANLDKVLSAYNKHRDKPIREQAENIIHLFTLTNLGAPAAFKYFDTTIDRKRYTSTKEVLDATLIHQSITGLYETRIDLSQLGGDGGGGSGSSPAPGGTLGDQGSRGSDPLPEPRVTLTVEGIPTEFLVNTGAEHSVLTKPMGKMGSKRTVVAGATGSKVYPWTTKRLLKIGQKQVTHSFLVIPECPAPLLGRDLLTKLKAQIQFSTEGPQVTWEDRPAMCLVLNLEEEYRLHEKPVPPSIDPSWLQLFPMVWAEKAGMGLANQVPPVVVELKSDASPVAVRQYPMSKEAREGIRPHIQRFLDLGILVPCQSPWNTPLLPVKKPGTNDYRPVQDLREVNKRVQDIHPTVPNPYNLLSSLPPSHTWYSVLDLKDAFFCLKLHPNSQPLFAFEWRDPEKGNTGQLTWTRLPQGFKNSPTLFDEALHRDLASFRALNPQVVMLQYVDDLLVAAPTYRDCKEGTRRLLQELSKLGYRVSAKKAQLCREEVTYLGYLLKGGKRWLTPARKATVMKIPTPTTPRQVREFLGTAGFCRLWIPGFASLAAPLYPLTREKVPFTWTEAHQEAFGRIKEALLSAPALALPDLTKPFALYVDEKEGVARGVLTQTLGPWRRPVAYLSKKLDPVASGWPTCLKAIAAVALLLKDADKLTLGQNVLVIAPHNLESIVRQPPDRWMTNARMTHYQSLLLNERVSFAPPAILNPATLLPVESDDTPIHICSEILAEETGTRPDLRDQPLPGVPAWYTDGSSFIMDGRRQAGAAIVDNKRTVWASNLPEGTSAQKAELIALTQALRLAEGKSINIYTDSRYAFATAHVHGAIYKQRGLLTSAGKDIKNKEEILALLEAIHLPKRVAIIHCPGHQRGTDPVATGNRKADEAAKQAAQSTRILTETTKNAGKRTADGSEFEKRTADGSEFESPKKKAKVE

SEQ ID NO: 7127 - protein, 2125 aa, synthetic construct
MPAAKRVKLDGGDKKYSIGLDIGTNSVGWAVITDEYKVPSKKFKVLGNTDRHSIKKNLIGALLFDSGETAEATRLKRTARRRYTRRKNRICYLQEIFSNEMAKVDDSFFHRLEESFLVEEDKKHERHPIFGNIVDEVAYHEKYPTIYHLRKKLVDSTDKADLRLIYLALAHMIKFRGHFLIEGDLNPDNSDVDKLFIQLVQTYNQLFEENPINASGVDAKAILSARLSKSRRLENLIAQLPGEKKNGLFGNLIALSLGLTPNFKSNFDLAEDAKLQLSKDTYDDDLDNLLAQIGDQYADLFLAAKNLSDAILLSDILRVNTEITKAPLSASMIKRYDEHHQDLTLLKALVRQQLPEKYKEIFFDQSKNGYAGYIDGGASQEEFYKFIKPILEKMDGTEELLVKLNREDLLRKQRTFDNGSIPHQIHLGELHAILRRQEDFYPFLKDNREKIEKILTFRIPYYVGPLARGNSRFAWMTRKSEETITPWNFEEVVDKGASAQSFIERMTNFDKNLPNEKVLPKHSLLYEYFTVYNELTKVKYVTEGMRKPAFLSGEQKKAIVDLLFKTNRKVTVKQLKEDYFKKIECFDSVEISGVEDRFNASLGTYHDLLKIIKDKDFLDNEENEDILEDIVLTLTLFEDREMIEERLKTYAHLFDDKVMKQLKRRRYTGWGRLSRKLINGIRDKQSGKTILDFLKSDGFANRNFMQLIHDDSLTFKEDIQKAQVSGQGDSLHEHIANLAGSPAIKKGILQTVKVVDELVKVMGRHKPENIVIEMARENQTTQKGQKNSRERMKRIEEGIKELGSQILKEHPVENTQLQNEKLYLYYLQNGRDMYVDQELDINRLSDYDVDHIVPQSFLKDDSIDNKVLTRSDKARGKSDNVPSEEVVKKMKNYWRQLLNAKLITQRKFDNLTKAERGGLSELDKAGFIKRQLVETRQITKHVAQILDSRMNTKYDENDKLIREVKVITLKSKLVSDFRKDFQFYKVREINNYHHAHDAYLNAVVGTALIKKYPKLESEFVYGDYKVYDVRKMIAKSEQEIGKATAKYFFYSNIMNFFKTEITLANGEIRKRPLIETNGETGEIVWDKGRDFATVRKVLSMPQVNIVKKTEVQTGGFSKESILPKRNSDKLIARKKDWDPKKYGGFDSPTVAYSVLVVAKVEKGKSKKLKSVKELLGITIMERSSFEKNPIDFLEAKGYKEVKKDLIIKLPKYSLFELENGRKRMLASAGELQKGNELALPSKYVNFLYLASHYEKLKGSPEDNEQKQLFVEQHKHYLDEIIEQISEFSKRVILADANLDKVLSAYNKHRDKPIREQAENIIHLFTLTNLGAPAAFKYFDTTIDRKRYTSTKEVLDATLIHQSITGLYETRIDLSQLGGDGGGGSGSSPAPGGLLGRDLLTKLKAQIQFSTEGPQVTWEDRPAMCLVLNLEEEYRLHEKPVPPSIDPSWLQLFPMVWAEKAGMGLANQVPPVVVELKSDASPVAVRQYPMSKEAREGIRPHIQRFLDLGILVPCQSPWNTPLLPVKKPGTNDYRPVQDLREVNKRVQDIHPTVPNPYNLLSSLPPSHTWYSVLDLKDAFFCLKLHPNSQPLFAFEWRDPEKGNTGQLTWTRLPQGFKNSPTLFNEALHRDLASFRALNPQVVMLQYVDDLLVAAPTYRDCKEGTRRLLQELSKLGYRVSAKKAQLCREEVTYLGYLLKGGKRWLTPARKATVMKIPTPTTPRQVREFLGKAGFCRLFIPGFASLAAPLYPLTRPKVPFTWTEAHQEAFGRIKEALLSAPALALPDLTKPFALYVDEKEGVARGVLTQTLGPWRRPVAYLSKKLDPVASGWPTCLKAIAAVALLLKDADKLTLGQNVLVIAPHNLESIVRQPPDRWMTNARMTHYQSLLLNERVSFAPPAILNPATLLPVESDDTPIHICSEILAEETGTRPDLRDQPLPGVPAWYTDGSSFIMDGRRQAGAAIVDNKRTVWASNLPEGTSAQKAELIALTQALRLAEGKSINIYTDSRYAFATAHVHGAIYKQRGWLTSAGKDIKNKEEILALLEAIHLPKRVAIIHCPGHQRGTDPVATGNRKADEAAKQAAQSTRILTETTKNAGKRTADGSEFEKRTADGSEFESPKKKAKVE

SEQ ID NO: 7128 - protein, 2216 aa, synthetic construct
MPAAKRVKLDGGDKKYSIGLDIGTNSVGWAVITDEYKVPSKKFKVLGNTDRHSIKKNLIGALLFDSGETAEATRLKRTARRRYTRRKNRICYLQEIFSNEMAKVDDSFFHRLEESFLVEEDKKHERHPIFGNIVDEVAYHEKYPTIYHLRKKLVDSTDKADLRLIYLALAHMIKFRGHFLIEGDLNPDNSDVDKLFIQLVQTYNQLFEENPINASGVDAKAILSARLSKSRRLENLIAQLPGEKKNGLFGNLIALSLGLTPNFKSNFDLAEDAKLQLSKDTYDDDLDNLLAQIGDQYADLFLAAKNLSDAILLSDILRVNTEITKAPLSASMIKRYDEHHQDLTLLKALVRQQLPEKYKEIFFDQSKNGYAGYIDGGASQEEFYKFIKPILEKMDGTEELLVKLNREDLLRKQRTFDNGSIPHQIHLGELHAILRRQEDFYPFLKDNREKIEKILTFRIPYYVGPLARGNSRFAWMTRKSEETITPWNFEEVVDKGASAQSFIERMTNFDKNLPNEKVLPKHSLLYEYFTVYNELTKVKYVTEGMRKPAFLSGEQKKAIVDLLFKTNRKVTVKQLKEDYFKKIECFDSVEISGVEDRFNASLGTYHDLLKIIKDKDFLDNEENEDILEDIVLTLTLFEDREMIEERLKTYAHLFDDKVMKQLKRRRYTGWGRLSRKLINGIRDKQSGKTILDFLKSDGFANRNFMQLIHDDSLTFKEDIQKAQVSGQGDSLHEHIANLAGSPAIKKGILQTVKVVDELVKVMGRHKPENIVIEMARENQTTQKGQKNSRERMKRIEEGIKELGSQILKEHPVENTQLQNEKLYLYYLQNGRDMYVDQELDINRLSDYDVDHIVPQSFLKDDSIDNKVLTRSDKARGKSDNVPSEEVVKKMKNYWRQLLNAKLITQRKFDNLTKAERGGLSELDKAGFIKRQLVETRQITKHVAQILDSRMNTKYDENDKLIREVKVITLKSKLVSDFRKDFQFYKVREINNYHHAHDAYLNAVVGTALIKKYPKLESEFVYGDYKVYDVRKMIAKSEQEIGKATAKYFFYSNIMNFFKTEITLANGEIRKRPLIETNGETGEIVWDKGRDFATVRKVLSMPQVNIVKKTEVQTGGFSKESILPKRNSDKLIARKKDWDPKKYGGFDSPTVAYSVLVVAKVEKGKSKKLKSVKELLGITIMERSSFEKNPIDFLEAKGYKEVKKDLIIKLPKYSLFELENGRKRMLASAGELQKGNELALPSKYVNFLYLASHYEKLKGSPEDNEQKQLFVEQHKHYLDEIIEQISEFSKRVILADANLDKVLSAYNKHRDKPIREQAENIIHLFTLTNLGAPAAFKYFDTTIDRKRYTSTKEVLDATLIHQSITGLYETRIDLSQLGGDGGGGSGSSPAPGGTLGDQGSRGSDPLPEPRVTLTVEGIPTEFLVNTGAEHSVLTKPMGKMGSKRTVVAGATGSKVYPWTTKRLLKIGQKQVTHSFLVIPECPAPLLGRDLLTKLKAQIQFSTEGPQVTWEDRPAMCLVLNLEEEYRLHEKPVPPSIDPSWLQLFPMVWAEKAGMGLANQVPPVVVELKSDASPVAVRQYPMSKEAREGIRPHIQRFLDLGILVPCQSPWNTPLLPVKKPGTNDYRPVQDLREVNKRVQDIHPTVPNPYNLLSSLPPSHTWYSVLDLKDAFFCLKLHPNSQPLFAFEWRDPEKGNTGQLTWTRLPQGFKNSPTLFNEALHRDLASFRALNPQVVMLQYVDDLLVAAPTYRDCKEGTRRLLQELSKLGYRVSAKKAQLCREEVTYLGYLLKGGKRWLTPARKATVMKIPTPTTPRQVREFLGKAGFCRLFIPGFASLAAPLYPLTRPKVPFTWTEAHQEAFGRIKEALLSAPALALPDLTKPFALYVDEKEGVARGVLTQTLGPWRRPVAYLSKKLDPVASGWPTCLKAIAAVALLLKDADKLTLGQNVLVIAPHNLESIVRQPPDRWMTNARMTHYQSLLLNERVSFAPPAILNPATLLPVESDDTPIHICSEILAEETGTRPDLRDQPLPGVPAWYTDGSSFIMDGRRQAGAAIVDNKRTVWASNLPEGTSAQKAELIALTQALRLAEGKSINIYTDSRYAFATAHVHGAIYKQRGWLTSAGKDIKNKEEILALLEAIHLPKRVAIIHCPGHQRGTDPVATGNRKADEAAKQAAQSTRILTETTKNAGKRTADGSEFEKRTADGSEFESPKKKAKVE

SEQ ID NO: 7129 - protein, 2094 aa, synthetic construct
MPAAKRVKLDGGDKKYSIGLDIGTNSVGWAVITDEYKVPSKKFKVLGNTDRHSIKKNLIGALLFDSGETAEATRLKRTARRRYTRRKNRICYLQEIFSNEMAKVDDSFFHRLEESFLVEEDKKHERHPIFGNIVDEVAYHEKYPTIYHLRKKLVDSTDKADLRLIYLALAHMIKFRGHFLIEGDLNPDNSDVDKLFIQLVQTYNQLFEENPINASGVDAKAILSARLSKSRRLENLIAQLPGEKKNGLFGNLIALSLGLTPNFKSNFDLAEDAKLQLSKDTYDDDLDNLLAQIGDQYADLFLAAKNLSDAILLSDILRVNTEITKAPLSASMIKRYDEHHQDLTLLKALVRQQLPEKYKEIFFDQSKNGYAGYIDGGASQEEFYKFIKPILEKMDGTEELLVKLNREDLLRKQRTFDNGSIPHQIHLGELHAILRRQEDFYPFLKDNREKIEKILTFRIPYYVGPLARGNSRFAWMTRKSEETITPWNFEEVVDKGASAQSFIERMTNFDKNLPNEKVLPKHSLLYEYFTVYNELTKVKYVTEGMRKPAFLSGEQKKAIVDLLFKTNRKVTVKQLKEDYFKKIECFDSVEISGVEDRFNASLGTYHDLLKIIKDKDFLDNEENEDILEDIVLTLTLFEDREMIEERLKTYAHLFDDKVMKQLKRRRYTGWGRLSRKLINGIRDKQSGKTILDFLKSDGFANRNFMQLIHDDSLTFKEDIQKAQVSGQGDSLHEHIANLAGSPAIKKGILQTVKVVDELVKVMGRHKPENIVIEMARENQTTQKGQKNSRERMKRIEEGIKELGSQILKEHPVENTQLQNEKLYLYYLQNGRDMYVDQELDINRLSDYDVDHIVPQSFLKDDSIDNKVLTRSDKARGKSDNVPSEEVVKKMKNYWRQLLNAKLITQRKFDNLTKAERGGLSELDKAGFIKRQLVETRQITKHVAQILDSRMNTKYDENDKLIREVKVITLKSKLVSDFRKDFQFYKVREINNYHHAHDAYLNAVVGTALIKKYPKLESEFVYGDYKVYDVRKMIAKSEQEIGKATAKYFFYSNIMNFFKTEITLANGEIRKRPLIETNGETGEIVWDKGRDFATVRKVLSMPQVNIVKKTEVQTGGFSKESILPKRNSDKLIARKKDWDPKKYGGFDSPTVAYSVLVVAKVEKGKSKKLKSVKELLGITIMERSSFEKNPIDFLEAKGYKEVKKDLIIKLPKYSLFELENGRKRMLASAGELQKGNELALPSKYVNFLYLASHYEKLKGSPEDNEQKQLFVEQHKHYLDEIIEQISEFSKRVILADANLDKVLSAYNKHRDKPIREQAENIIHLFTLTNLGAPAAFKYFDTTIDRKRYTSTKEVLDATLIHQSITGLYETRIDLSQLGGDGGGGSGSSPAPGGTLNLEDEYRLYETSAEPEVSPGSTWLSDFPQAWAETGGMGLAVRQAPLIIPLKATSTPVSIKQYPMSQEAKLGIKPHIQRLLDQGILVPCQSPWNTPLLPVKKPGTNDYRPVQDLREVNKRVEDIHPTVPNPYNLLSGLPPSHRWYTVLDLKDAFFCLRLHPTSQPLFAFEWRDPGMGISGQLTWTRLPQGFKNSPTLFNEALHRDLADFRIQHPDLILLQYVDDILLAATSELDCQQGTRALLLTLGNLGYRASAKKAQLCQKQVKYLGYLLKEGQRWLTEARKETVMGQPTPKTPRQLREFLGKAGFCRLFIPGFAEMAAPLYPLTKPGTLFNWGPDQQKAYQEIKQALLTAPALGLPDLTKPFELFVDEKQGYAKGVLTQKLGPWRRPVAYLSKKLDPVAAGWPPCLRMVAAIAVLRKDAGKLTMGQPLVILAPHAVEALVKQPPDRWLSNARMTHYQAMLLDTDRVQFGPVVALNPATLLPLPEEGAPHDCLEILAETHGTRPDLTDQPIPDADHTWYTDGSSFLQEGQRKAGAAVTTETEVIWARALPAGTSAQRAELIALTQALKMAEGKRLNVYTDSRYAFATAHIHGEIYRRRGWLTSEGREIKNKSEILALLKALFLPKRLSIIHCLGHQKGDSAEARGNRLADQAAREAAIKTPPDTSTLLAGKRTADGSEFEKRTADGSEFESPKKKAKVE

SEQ ID NO: 7130 - protein, 2094 aa, synthetic construct
MPAAKRVKLDGGDKKYSIGLDIGTNSVGWAVITDEYKVPSKKFKVLGNTDRHSIKKNLIGALLFDSGETAEATRLKRTARRRYTRRKNRICYLQEIFSNEMAKVDDSFFHRLEESFLVEEDKKHERHPIFGNIVDEVAYHEKYPTIYHLRKKLVDSTDKADLRLIYLALAHMIKFRGHFLIEGDLNPDNSDVDKLFIQLVQTYNQLFEENPINASGVDAKAILSARLSKSRRLENLIAQLPGEKKNGLFGNLIALSLGLTPNFKSNFDLAEDAKLQLSKDTYDDDLDNLLAQIGDQYADLFLAAKNLSDAILLSDILRVNTEITKAPLSASMIKRYDEHHQDLTLLKALVRQQLPEKYKEIFFDQSKNGYAGYIDGGASQEEFYKFIKPILEKMDGTEELLVKLNREDLLRKQRTFDNGSIPHQIHLGELHAILRRQEDFYPFLKDNREKIEKILTFRIPYYVGPLARGNSRFAWMTRKSEETITPWNFEEVVDKGASAQSFIERMTNFDKNLPNEKVLPKHSLLYEYFTVYNELTKVKYVTEGMRKPAFLSGEQKKAIVDLLFKTNRKVTVKQLKEDYFKKIECFDSVEISGVEDRFNASLGTYHDLLKIIKDKDFLDNEENEDILEDIVLTLTLFEDREMIEERLKTYAHLFDDKVMKQLKRRRYTGWGRLSRKLINGIRDKQSGKTILDFLKSDGFANRNFMQLIHDDSLTFKEDIQKAQVSGQGDSLHEHIANLAGSPAIKKGILQTVKVVDELVKVMGRHKPENIVIEMARENQTTQKGQKNSRERMKRIEEGIKELGSQILKEHPVENTQLQNEKLYLYYLQNGRDMYVDQELDINRLSDYDVDHIVPQSFLKDDSIDNKVLTRSDKARGKSDNVPSEEVVKKMKNYWRQLLNAKLITQRKFDNLTKAERGGLSELDKAGFIKRQLVETRQITKHVAQILDSRMNTKYDENDKLIREVKVITLKSKLVSDFRKDFQFYKVREINNYHHAHDAYLNAVVGTALIKKYPKLESEFVYGDYKVYDVRKMIAKSEQEIGKATAKYFFYSNIMNFFKTEITLANGEIRKRPLIETNGETGEIVWDKGRDFATVRKVLSMPQVNIVKKTEVQTGGFSKESILPKRNSDKLIARKKDWDPKKYGGFDSPTVAYSVLVVAKVEKGKSKKLKSVKELLGITIMERSSFEKNPIDFLEAKGYKEVKKDLIIKLPKYSLFELENGRKRMLASAGELQKGNELALPSKYVNFLYLASHYEKLKGSPEDNEQKQLFVEQHKHYLDEIIEQISEFSKRVILADANLDKVLSAYNKHRDKPIREQAENIIHLFTLTNLGAPAAFKYFDTTIDRKRYTSTKEVLDATLIHQSITGLYETRIDLSQLGGDGGGGSGSSPAPGGLGIEDEYRLHETSTEPDVSLGSTWLSDFPQAWAETGGMGLAVRQAPLIIPLKATSTPVSIQQYPMSHEARLGIKPHIQRLLDQGILVPCQSPWNTPLLPVKKPGTNDYRPVQDLREVNKRVEDIHPTVPNPYNLLSGLPPSHQWYTVLDLKDAFFCLRLHPTSQPLFAFEWRDPGMGISGQLTWTRLPQGFKNSPTLFNEALHRDLADFRIQHPDLILLQYVDDILLAATSELDCQQGTRALLQTLGDLGYRASAKKAQICQKQVKYLGYLLREGQRWLTEARKETVMGQPVPKTPRQLREFLGKAGFCRLFIPGFAEMAAPLYPLTKPGTLFSWGPDQQKAYQEIKQALLTAPALGLPDLTKPFELFVDEKQGYAKGVLTQKLGPWRRPVAYLSKKLDPVAAGWPPCLRMVAAIAVLTKDAGKLTMGQPLVILAPHAVEALVKQPPDRWLSNARMTHYQAMLLDTDRVQFGPVVALNPATLLPLPEEGAPHDCLEILAETHGTRPDLTDQPIPDADHTWYTDGSSFLQEGQRKAGAAVTTETEVIWAGALPAGTSAQRAELIALTQALKMAEGKRLNVYTDSRYAFATAHIHGEIYRRRGWLTSEGREIKNKSEILALLKALFLPKRLSIIHCLGHQKGDSAEARGNRLADQAAREAAIKTPPDTSTLLIAGKRTADGSEFEKRTADGSEFESPKKKAKVE

SEQ ID NO: 7131 - protein, 2094 aa, synthetic construct; identical to SEQ ID NO: 7130

SEQ ID NO: 7132 - protein, 2094 aa, synthetic construct
MPAAKRVKLDGGDKKYSIGLDIGTNSVGWAVITDEYKVPSKKFKVLGNTDRHSIKKNLIGALLFDSGETAEATRLKRTARRRYTRRKNRICYLQEIFSNEMAKVDDSFFHRLEESFLVEEDKKHERHPIFGNIVDEVAYHEKYPTIYHLRKKLVDSTDKADLRLIYLALAHMIKFRGHFLIEGDLNPDNSDVDKLFIQLVQTYNQLFEENPINASGVDAKAILSARLSKSRRLENLIAQLPGEKKNGLFGNLIALSLGLTPNFKSNFDLAEDAKLQLSKDTYDDDLDNLLAQIGDQYADLFLAAKNLSDAILLSDILRVNTEITKAPLSASMIKRYDEHHQDLTLLKALVRQQLPEKYKEIFFDQSKNGYAGYIDGGASQEEFYKFIKPILEKMDGTEELLVKLNREDLLRKQRTFDNGSIPHQIHLGELHAILRRQEDFYPFLKDNREKIEKILTFRIPYYVGPLARGNSRFAWMTRKSEETITPWNFEEVVDKGASAQSFIERMTNFDKNLPNEKVLPKHSLLYEYFTVYNELTKVKYVTEGMRKPAFLSGEQKKAIVDLLFKTNRKVTVKQLKEDYFKKIECFDSVEISGVEDRFNASLGTYHDLLKIIKDKDFLDNEENEDILEDIVLTLTLFEDREMIEERLKTYAHLFDDKVMKQLKRRRYTGWGRLSRKLINGIRDKQSGKTILDFLKSDGFANRNFMQLIHDDSLTFKEDIQKAQVSGQGDSLHEHIANLAGSPAIKKGILQTVKVVDELVKVMGRHKPENIVIEMARENQTTQKGQKNSRERMKRIEEGIKELGSQILKEHPVENTQLQNEKLYLYYLQNGRDMYVDQELDINRLSDYDVDHIVPQSFLKDDSIDNKVLTRSDKARGKSDNVPSEEVVKKMKNYWRQLLNAKLITQRKFDNLTKAERGGLSELDKAGFIKRQLVETRQITKHVAQILDSRMNTKYDENDKLIREVKVITLKSKLVSDFRKDFQFYKVREINNYHHAHDAYLNAVVGTALIKKYPKLESEFVYGDYKVYDVRKMIAKSEQEIGKATAKYFFYSNIMNFFKTEITLANGEIRKRPLIETNGETGEIVWDKGRDFATVRKVLSMPQVNIVKKTEVQTGGFSKESILPKRNSDKLIARKKDWDPKKYGGFDSPTVAYSVLVVAKVEKGKSKKLKSVKELLGITIMERSSFEKNPIDFLEAKGYKEVKKDLIIKLPKYSLFELENGRKRMLASAGELQKGNELALPSKYVNFLYLASHYEKLKGSPEDNEQKQLFVEQHKHYLDEIIEQISEFSKRVILADANLDKVLSAYNKHRDKPIREQAENIIHLFTLTNLGAPAAFKYFDTTIDRKRYTSTKEVLDATLIHQSITGLYETRIDLSQLGGDGGGGSGSSPAPGGTLNIEDEYRLHETSKGPDVPLGSTWLSDFPQAWAETGGMGLAVRQAPLIIPLKATSTPVSIKQYPMSQEARLGIKPHIQRLLDQGILVPCQSPWNTPLLPVKKPGTNDYRPVQDLREVNKRVEDIHPTVPNPYNLLSGLPPSHQWYTVLDLKDAFFCLRLHPTSQSLFAFEWRDPEMGISGQLTWTRLPQGFKNSPTLFNEALHRDLADFRIQHPDLILLQYVDDLLLAATSELDCQQGTRALLQTLGDLGYRASAKKAQICQKQVKYLGYLLKEGQRWLTEARKETVMGQPTPKTPRQLREFLGTAGFCRLWIPGFAEMAAPLYPLTKPGTLFEWGPDQQKAYQEIKQALLTAPALGLPDLTKPFELFVDEKQGYAKGVLTQKLGPWRRPVAYLSKKLDPVAAGWPPCLRMVAAIAVLTKDAGKLTMGQPLVILAPHAVEALVKQPPDRWLSNARMTHYQALLLDTDRVQFGPIVALNPATLLPLPEEGLQHDCLDILAEAHGTRPDLTDQPLPDADHTWYTDGSSFLQEGQRKAGAAVTTETEVVWAKALPAGTSAQRAELIALTQALKMAEGKKLNVYTDSRYAFATAHIHGEIYRRRGWLTSEGKEIKNKDEILALLKALFLPKRLSIIHCPGHQKGNRAEARGNRMADQAAREVATRETPETSTLLAGKRTADGSEFEKRTADGSEFESPKKKAKVE

SEQ ID NO: 7133 - protein, 2094 aa, synthetic construct
MPAAKRVKLDGGDKKYSIGLDIGTNSVGWAVITDEYKVPSKKFKVLGNTDRHSIKKNLIGALLFDSGETAEATRLKRTARRRYTRRKNRICYLQEIFSNEMAKVDDSFFHRLEESFLVEEDKKHERHPIFGNIVDEVAYHEKYPTIYHLRKKLVDSTDKADLRLIYLALAHMIKFRGHFLIEGDLNPDNSDVDKLFIQLVQTYNQLFEENPINASGVDAKAILSARLSKSRRLENLIAQLPGEKKNGLFGNLIALSLGLTPNFKSNFDLAEDAKLQLSKDTYDDDLDNLLAQIGDQYADLFLAAKNLSDAILLSDILRVNTEITKAPLSASMIKRYDEHHQDLTLLKALVRQQLPEKYKEIFFDQSKNGYAGYIDGGASQEEFYKFIKPILEKMDGTEELLVKLNREDLLRKQRTFDNGSIPHQIHLGELHAILRRQEDFYPFLKDNREKIEKILTFRIPYYVGPLARGNSRFAWMTRKSEETITPWNFEEVVDKGASAQSFIERMTNFDKNLPNEKVLPKHSLLYEYFTVYNELTKVKYVTEGMRKPAFLSGEQKKAIVDLLFKTNRKVTVKQLKEDYFKKIECFDSVEISGVEDRFNASLGTYHDLLKIIKDKDFLDNEENEDILEDIVLTLTLFEDREMIEERLKTYAHLFDDKVMKQLKRRRYTGWGRLSRKLINGIRDKQSGKTILDFLKSDGFANRNFMQLIHDDSLTFKEDIQKAQVSGQGDSLHEHIANLAGSPAIKKGILQTVKVVDELVKVMGRHKPENIVIEMARENQTTQKGQKNSRERMKRIEEGIKELGSQILKEHPVENTQLQNEKLYLYYLQNGRDMYVDQELDINRLSDYDVDHIVPQSFLKDDSIDNKVLTRSDKARGKSDNVPSEEVVKKMKNYWRQLLNAKLITQRKFDNLTKAERGGLSELDKAGFIKRQLVETRQITKHVAQILDSRMNTKYDENDKLIREVKVITLKSKLVSDFRKDFQFYKVREINNYHHAHDAYLNAVVGTALIKKYPKLESEFVYGDYKVYDVRKMIAKSEQEIGKATAKYFFYSNIMNFFKTEITLANGEIRKRPLIETNGETGEIVWDKGRDFATVRKVLSMPQVNIVKKTEVQTGGFSKESILPKRNSDKLIARKKDWDPKKYGGFDSPTVAYSVLVVAKVEKGKSKKLKSVKELLGITIMERSSFEKNPIDFLEAKGYKEVKKDLIIKLPKYSLFELENGRKRMLASAGELQKGNELALPSKYVNFLYLASHYEKLKGSPEDNEQKQLFVEQHKHYLDEIIEQISEFSKRVILADANLDKVLSAYNKHRDKPIREQAENIIHLFTLTNLGAPAAFKYFDTTIDRKRYTSTKEVLDATLIHQSITGLYETRIDLSQLGGDGGGGSGSSPAPGGTLNIEDEYRLHEISTEPDVSPGSTWLSDFPQAWAETGGMGLAVRQAPLIIPLKATSTPVSIKQYPMSQEAKLGIKPHIQRLLDQGILVPCQSPWNTPLLPVKKPGTNDYRPVQGLREVNKRVEDIHPTVPNPYNLLSGLPTSHRWYTVLDLKDAFFCLRLHPTSQPLFASEWRDPGMGISGQLTWTRLPQGFKNSPTLFNEALHRGLADFRIQHPDLILLQYVDDLLLAATSELDCQQGTRALLKTLGNLGYRASAKKAQICQKQVKYLGYLLREGQRWLTEARKETVMGQPTPKTPRQLREFLGTAGFCRLWIPRFAEMAAPLYPLTKPGTLFNWGPDQQKAYHEIKQALLTAPALGLPDLTKPFELFVDEKQGYAKGVLTQKLGPWRRPVAYLSKKLDPVAAGWPPCLRMVAAIAVLTKDAGKLTMGQPLVILAPHAVEALVKQPPDRWLSNARMTHYQAMLLDTDRVQFGPVVALNPATLLPLPEEGAPHDCLEILAETHGTEPDLTDQPIPDADHTWYTDGSSFLQEGQRKAGAAVTTETEVIWARALPAGTSAQRAELIALTQALKMAEGKRLNVYTDSRYAFATAHIHGEIYKRRGWLTSEGREIKNKSEILALLKALFLPKRLSIIHCLGHQKGDSAEARGNRLADQAAREAAIKTPPDTSTLLAGKRTADGSEFEKRTADGSEFESPKKKAKVE

SEQ ID NO: 7134 - protein, 2088 aa, synthetic construct
MPAAKRVKLDGGDKKYSIGLDIGTNSVGWAVITDEYKVPSKKFKVLGNTDRHSIKKNLIGALLFDSGETAEATRLKRTARRRYTRRKNRICYLQEIFSNEMAKVDDSFFHRLEESFLVEEDKKHERHPIFGNIVDEVAYHEKYPTIYHLRKKLVDSTDKADLRLIYLALAHMIKFRGHFLIEGDLNPDNSDVDKLFIQLVQTYNQLFEENPINASGVDAKAILSARLSKSRRLENLIAQLPGEKKNGLFGNLIALSLGLTPNFKSNFDLAEDAKLQLSKDTYDDDLDNLLAQIGDQYADLFLAAKNLSDAILLSDILRVNTEITKAPLSASMIKRYDEHHQDLTLLKALVRQQLPEKYKEIFFDQSKNGYAGYIDGGASQEEFYKFIKPILEKMDGTEELLVKLNREDLLRKQRTFDNGSIPHQIHLGELHAILRRQEDFYPFLKDNREKIEKILTFRIPYYVGPLARGNSRFAWMTRKSEETITPWNFEEVVDKGASAQSFIERMTNFDKNLPNEKVLPKHSLLYEYFTVYNELTKVKYVTEGMRKPAFLSGEQKKAIVDLLFKTNRKVTVKQLKEDYFKKIECFDSVEISGVEDRFNASLGTYHDLLKIIKDKDFLDNEENEDILEDIVLTLTLFEDREMIEERLKTYAHLFDDKVMKQLKRRRYTGWGRLSRKLINGIRDKQSGKTILDFLKSDGFANRNFMQLIHDDSLTFKEDIQKAQVSGQGDSLHEHIANLAGSPAIKKGILQTVKVVDELVKVMGRHKPENIVIEMARENQTTQKGQKNSRERMKRIEEGIKELGSQILKEHPVENTQLQNEKLYLYYLQNGRDMYVDQELDINRLSDYDVDHIVPQSFLKDDSIDNKVLTRSDKARGKSDNVPSEEVVKKMKNYWRQLLNAKLITQRKFDNLTKAERGGLSELDKAGFIKRQLVETRQITKHVAQILDSRMNTKYDENDKLIREVKVITLKSKLVSDFRKDFQFYKVREINNYHHAHDAYLNAVVGTALIKKYPKLESEFVYGDYKVYDVRKMIAKSEQEIGKATAKYFFYSNIMNFFKTEITLANGEIRKRPLIETNGETGEIVWDKGRDFATVRKVLSMPQVNIVKKTEVQTGGFSKESILPKRNSDKLIARKKDWDPKKYGGFDSPTVAYSVLVVAKVEKGKSKKLKSVKELLGITIMERSSFEKNPIDFLEAKGYKEVKKDLIIKLPKYSLFELENGRKRMLASAGELQKGNELALPSKYVNFLYLASHYEKLKGSPEDNEQKQLFVEQHKHYLDEIIEQISEFSKRVILADANLDKVLSAYNKHRDKPIREQAENIIHLFTLTNLGAPAAFKYFDTTIDRKRYTSTKEVLDATLIHQSITGLYETRIDLSQLGGDGGGGSGSSPAPGGTLQLDDEYRLYSPLVKPDQNIQFWLEQFPQAWAETAGMGLAKQVPPQVIQLKASATPVSVRQYPLSKEAQEGIRPHVQRLIQQGILVPVQSPWNTPLLPVRKPGTNDYRPVQDLREVNKRVQDIHPTVPNPYNLLCALPPQRSWYTVLDLKDAFFCLRLHPTSQPLFAFEWRDPGTGRTGQLTWTRLPQGFKNSPTIFDEALHRDLANFRIQHPQVTLLQYVDDLLLAGATKQDCLEGTKALLLELSDLGYRASAKKAQICRREVTYLGYSLRDGQRWLTEARKKTVVQIPAPTTAKQVREFLGTAGFCRLWIPGFATLAAPLYPLTKEKGEFSWAPEHQKAFDAIKKALLSAPALALPDVTKPFTLYVDERKGVARGVLTQTLGPWRRPVAYLSKKLDPVASGWPVCLKAIAAVAILVKDADKLTLGQNITVIAPHALENIVRQPPDRWMTNARMTHYQSLLLTERVTFAPPAALNPATLLPEETDEPVTHDCHQLLIEETGVRKDLTDIPLTGEVLTWFTDGSSYVVEGKRMAGAAVVDGTRTIWASSLPEGTSAQKAELMALTQALRLAEGKSINIYTDSRYAFATAHVHGAIYKQRGLLTSAGREIKNKEEILSLLEALHLPKRLAIIHCPGHQKAKDPISRGNQMADRVAKQAAQGVNLLAGKRTADGSEFEKRTADGSEFESPKKKAKVE

SEQ ID NO: 7135 - protein, 2092 aa, synthetic construct
MPAAKRVKLDGGDKKYSIGLDIGTNSVGWAVITDEYKVPSKKFKVLGNTDRHSIKKNLIGALLFDSGETAEATRLKRTARRRYTRRKNRICYLQEIFSNEMAKVDDSFFHRLEESFLVEEDKKHERHPIFGNIVDEVAYHEKYPTIYHLRKKLVDSTDKADLRLIYLALAHMIKFRGHFLIEGDLNPDNSDVDKLFIQLVQTYNQLFEENPINASGVDAKAILSARLSKSRRLENLIAQLPGEKKNGLFGNLIALSLGLTPNFKSNFDLAEDAKLQLSKDTYDDDLDNLLAQIGDQYADLFLAAKNLSDAILLSDILRVNTEITKAPLSASMIKRYDEHHQDLTLLKALVRQQLPEKYKEIFFDQSKNGYAGYIDGGASQEEFYKFIKPILEKMDGTEELLVKLNREDLLRKQRTFDNGSIPHQIHLGELHAILRRQEDFYPFLKDNREKIEKILTFRIPYYVGPLARGNSRFAWMTRKSEETITPWNFEEVVDKGASAQSFIERMTNFDKNLPNEKVLPKHSLLYEYFTVYNELTKVKYVTEGMRKPAFLSGEQKKAIVDLLFKTNRKVTVKQLKEDYFKKIECFDSVEISGVEDRFNASLGTYHDLLKIIKDKDFLDNEENEDILEDIVLTLTLFEDREMIEERLKTYAHLFDDKVMKQLKRRRYTGWGRLSRKLINGIRDKQSGKTILDFLKSDGFANRNFMQLIHDDSLTFKEDIQKAQVSGQGDSLHEHIANLAGSPAIKKGILQTVKVVDELVKVMGRHKPENIVIEMARENQTTQKGQKNSRERMKRIEEGIKELGSQILKEHPVENTQLQNEKLYLYYLQNGRDMYVDQELDINRLSDYDVDHIVPQSFLKDDSIDNKVLTRSDKARGKSDNVPSEEVVKKMKNYWRQLLNAKLITQRKFDNLTKAERGGLSELDKAGFIKRQLVETRQITKHVAQILDSRMNTKYDENDKLIREVKVITLKSKLVSDFRKDFQFYKVREINNYHHAHDAYLNAVVGTALIKKYPKLESEFVYGDYKVYDVRKMIAKSEQEIGKATAKYFFYSNIMNFFKTEITLANGEIRKRPLIETNGETGEIVWDKGRDFATVRKVLSMPQVNIVKKTEVQTGGFSKESILPKRNSDKLIARKKDWDPKKYGGFDSPTVAYSVLVVAKVEKGKSKKLKSVKELLGITIMERSSFEKNPIDFLEAKGYKEVKKDLIIKLPKYSLFELENGRKRMLASAGELQKGNELALPSKYVNFLYLASHYEKLKGSPEDNEQKQLFVEQHKHYLDEIIEQISEFSKRVILADANLDKVLSAYNKHRDKPIREQAENIIHLFTLTNLGAPAAFKYFDTTIDRKRYTSTKEVLDATLIHQSITGLYETRIDLSQLGGDGGGGSGSSPAPGGVLNLEEEYRLHEKPVPSSIDPSWLQLFPTVWAERAGMGLANQVPPVVVELRSGASPVAVRQYPMSKEAREGIRPHIQRFLDLGVLVPCQSPWNTPLLPVKKPGTNDYRPVQDLREINKRVQDIHPTVPNPYNLLSSLPPSHTWYSVLDLKDAFFCLKLHPNSQPLFAFEWRDPEKGNTGQLTWTRLPQGFKNSPTLFNEALHRDLAPFRALNPQVVLLQYVDDLLVAAPTYRDCKEGTQKLLQELSKLGYRVSAKKAQLCQKEVTYLGYLLKEGKRWLTPARKATVMKIPPPTTPRQVREFLGTAGFCRLWIPGFASLAAPLYPLTKPSIPFIWTEEHQKAFDRIKEALLSAPALALPDLTKPFTLYVDERAGVARGVLTQTLGPWRRPVAYLSKKLDPVASGWPTCLKAVAAVALLLKDADKLTLGQNVTVIASHSLESIVRQPPDRWMTNARMTHYQSLLLNERVSFAPPAVLNPATLLPVESEATPVHRCSEILAEETGTRRDLKDQPLPGVPAWYTDGSSFIAEGKRRAGAAIVDGKRTVWASSLPEGTSAQKAELVALTQALRLAEGKDINIYTDSRYAFATAHIHGAIYKQRGWLTSAGKDIKNKEEILALLEAIHLPKRVAIIHCPGHQKGNDPVATGNRRADEAAKQAALSTRVLAETTKPAGKRTADGSEFEKRTADGSEFESPKKKAKVE

SEQ ID NO: 7136 - protein, 2094 aa, synthetic construct
MPAAKRVKLDGGDKKYSIGLDIGTNSVGWAVITDEYKVPSKKFKVLGNTDRHSIKKNLIGALLFDSGETAEATRLKRTARRRYTRRKNRICYLQEIFSNEMAKVDDSFFHRLEESFLVEEDKKHERHPIFGNIVDEVAYHEKYPTIYHLRKKLVDSTDKADLRLIYLALAHMIKFRGHFLIEGDLNPDNSDVDKLFIQLVQTYNQLFEENPINASGVDAKAILSARLSKSRRLENLIAQLPGEKKNGLFGNLIALSLGLTPNFKSNFDLAEDAKLQLSKDTYDDDLDNLLAQIGDQYADLFLAAKNLSDAILLSDILRVNTEITKAPLSASMIKRYDEHHQDLTLLKALVRQQLPEKYKEIFFDQSKNGYAGYIDGGASQEEFYKFIKPILEKMDGTEELLVKLNREDLLRKQRTFDNGSIPHQIHLGELHAILRRQEDFYPFLKDNREKIEKILTFRIPYYVGPLARGNSRFAWMTRKSEETITPWNFEEVVDKGASAQSFIERMTNFDKNLPNEKVLPKHSLLYEYFTVYNELTKVKYVTEGMRKPAFLSGEQKKAIVDLLFKTNRKVTVKQLKEDYFKKIECFDSVEISGVEDRFNASLGTYHDLLKIIKDKDFLDNEENEDILEDIVLTLTLFEDREMIEERLKTYAHLFDDKVMKQLKRRRYTGWGRLSRKLINGIRDKQSGKTILDFLKSDGFANRNFMQLIHDDSLTFKEDIQKAQVSGQGDSLHEHIANLAGSPAIKKGILQTVKVVDELVKVMGRHKPENIVIEMARENQTTQKGQKNSRERMKRIEEGIKELGSQILKEHPVENTQLQNEKLYLYYLQNGRDMYVDQELDINRLSDYDVDHIVPQSFLKDDSIDNKVLTRSDKARGKSDNVPSEEVVKKMKNYWRQLLNAKLITQRKFDNLTKAERGGLSELDKAGFIKRQLVETRQITKHVAQILDSRMNTKYDENDKLIREVKVITLKSKLVSDFRKDFQFYKVREINNYHHAHDAYLNAVVGTALIKKYPKLESEFVYGDYKVYDVRKMIAKSEQEIGKATAKYFFYSNIMNFFKTEITLANGEIRKRPLIETNGETGEIVWDKGRDFATVRKVLSMPQVNIVKKTEVQTGGFSKESILPKRNSDKLIARKKDWDPKKYGGFDSPTVAYSVLVVAKVEKGKSKKLKSVKELLGITIMERSSFEKNPIDFLEAKGYKEVKKDLIIKLPKYSLFELENGRKRMLASAGELQKGNELALPSKYVNFLYLASHYEKLKGSPEDNEQKQLFVEQHKHYLDEIIEQISEFSKRVILADANLDKVLSAYNKHRDKPIREQAENIIHLFTLTNLGAPAAFKYFDTTIDRKRYTSTKEVLDATLIHQSITGLYETRIDLSQLGGDGGGGSGSSPAPGGTLNIEDEYRLHETSKEPDVPLGSTWLSDFPQAWAETGGMGLAVRQAPLIIPLKATSTPVSIKQYPMSQEARLGIKPHIQRLLDQGILVPCQSPWNTPLLPVKKPGTNDYRPVQDLREVNKRVEDIHPTVPNPYNLLSGLPPSHQWYTVLDLKDAFFCLRLHPTSQPLFAFEWRDPEMGISGQLTWTRLPQGFKNSPTLFDEALHRDLADFRIQHPDLILLQYVDDLLLAATSEQDCQRGTRALLQTLGNLGYRASAKKAQICQKQVKYLGYLLKEGQRWLTEARKETVMGQPTPKTPRQLREFLGTAGFCRLWIPGFAEMAAPLYPLTKTGTLFNWGPDQQKAYQEIKQALLTAPALGLPDLTKPFELFVDEKQGYAKGVLTQKLGPWRRPVAYLSKKLDPVAAGWPPCLRMVAAIAVLTKDAGKLTMGQPLVILAPHAVEALVKQPPDRWLSNARMTHYQAMLLDTDRVQFGPVVALNPATLLPLPEKEAPHDCLEILAETHGTRPDLTDQPIPDADYTWYTDGSSFLQEGQRRAGAAVTTETEVIWARALPAGTSAQRAELIALTQALKMAEGKKLNVYTDSRYAFATAHVHGEIYRRRGLLTSEGREIKNKNEILALLKALFLPKRLSIIHCPGHQKGNSAEARGNRMADQAAREAAMKAVLETSTLLAGKRTADGSEFEKRTADGSEFESPKKKAKVE

SEQ ID NO: 7137 - protein, 2094 aa, synthetic construct
MPAAKRVKLDGGDKKYSIGLDIGTNSVGWAVITDEYKVPSKKFKVLGNTDRHSIKKNLIGALLFDSGETAEATRLKRTARRRYTRRKNRICYLQEIFSNEMAKVDDSFFHRLEESFLVEEDKKHERHPIFGNIVDEVAYHEKYPTIYHLRKKLVDSTDKADLRLIYLALAHMIKFRGHFLIEGDLNPDNSDVDKLFIQLVQTYNQLFEENPINASGVDAKAILSARLSKSRRLENLIAQLPGEKKNGLFGNLIALSLGLTPNFKSNFDLAEDAKLQLSKDTYDDDLDNLLAQIGDQYADLFLAAKNLSDAILLSDILRVNTEITKAPLSASMIKRYDEHHQDLTLLKALVRQQLPEKYKEIFFDQSKNGYAGYIDGGASQEEFYKFIKPILEKMDGTEELLVKLNREDLLRKQRTFDNGSIPHQIHLGELHAILRRQEDFYPFLKDNREKIEKILTFRIPYYVGPLARGNSRFAWMTRKSEETITPWNFEEVVDKGASAQSFIERMTNFDKNLPNEKVLPKHSLLYEYFTVYNELTKVKYVTEGMRKPAFLSGEQKKAIVDLLFKTNRKVTVKQLKEDYFKKIECFDSVEISGVEDRFNASLGTYHDLLKIIKDKDFLDNEENEDILEDIVLTLTLFEDREMIEERLKTYAHLFDDKVMKQLKRRRYTGWGRLSRKLINGIRDKQSGKTILDFLKSDGFANRNFMQLIHDDSLTFKEDIQKAQVSGQGDSLHEHIANLAGSPAIKKGILQTVKVVDELVKVMGRHKPENIVIEMARENQTTQKGQKNSRERMKRIEEGIKELGSQILKEHPVENTQLQNEKLYLYYLQNGRDMYVDQELDINRLSDYDVDHIVPQSFLKDDSIDNKVLTRSDKARGKSDNVPSEEVVKKMKNYWRQLLNAKLITQRKFDNLTKAERGGLSELDKAGFIKRQLVETRQITKHVAQILDSRMNTKYDENDKLIREVKVITLKSKLVSDFRKDFQFYKVREINNYHHAHDAYLNAVVGTALIKKYPKLESEFVYGDYKVYDVRKMIAKSEQEIGKATAKYFFYSNIMNFFKTEITLANGEIRKRPLIETNGETGEIVWDKGRDFATVRKVLSMPQVNIVKKTEVQTGGFSKESILPKRNSDKLIARKKDWDPKKYGGFDSPTVAYSVLVVAKVEKGKSKKLKSVKELLGITIMERSSFEKNPIDFLEAKGYKEVKKDLIIKLPKYSLFELENGRKRMLASAGELQKGNELALPSKYVNFLYLASHYEKLKGSPEDNEQKQLFVEQHKHYLDEIIEQISEFSKRVILADANLDKVLSAYNKHRDKPIREQAENIIHLFTLTNLGAPAAFKYFDTTIDRKRYTSTKEVLDATLIHQSITGLYETRIDLSQLGGDGGGGSGSSPAPGGTLNIEDEYRLHETSKEPDVPLGSTWLSDFPQAWAETGGMGLAVRQAPLIIPLKATSTPVSIKQYPMSQEARLGIKPHIQRLLDQGILVPCQSPWNTPLLPVKKPGTNDYRPVQDLREVNKRVEDIHPTVPNPYNLLSGLPPSHQWYTVLDLKDAFFCLRLHPTSQPLFAFEWRDPEMGISGQLTWTRLPQGFKNSPTLFNEALHRDLADFRIQHPDLILLQYVDDLLLAATSEQDCQRGTRALLQTLGNLGYRASAKKAQICQKQVKYLGYLLKEGQRWLTEARKETVMGQPTPKTPRQLREFLGTAGFCRLWIPGFAEMAAPLYPLTKPGTLFNWGPDQQKAYQEIKQALLTAPALGLPDLTKPFELFVDEKQGYAKGVLTQKLGPWRRPVAYLSKKLDPVAAGWPPCLRMVAAIAVLTKDAGKLTMGQPLVILAPHAVEALVKQPPDRWLSNARMTHYQAMLLDTDRVQFGPVVALNPATLLPLPEKEAPHDCLEILAETHGTRPDLTDQPIPDADYTWYTDGSSFLQEGQRRAGAAVTTETEVIWARALPAGTSAQRAELIALTQALKMAEGKKLNVYTDSRYAFATAHVHGEIYRRRGWLTSEGREIKNKNEILALLKALFLPKRLSIIHCPGHQKGNSAEARGNRMADQAAREAAMKAVLETSTLLAGKRTADGSEFEKRTADGSEFESPKKKAKVE

SEQ ID NO: 7138 - protein, 2093 aa, synthetic construct
MPAAKRVKLDGGDKKYSIGLDIGTNSVGWAVITDEYKVPSKKFKVLGNTDRHSIKKNLIGALLFDSGETAEATRLKRTARRRYTRRKNRICYLQEIFSNEMAKVDDSFFHRLEESFLVEEDKKHERHPIFGNIVDEVAYHEKYPTIYHLRKKLVDSTDKADLRLIYLALAHMIKFRGHFLIEGDLNPDNSDVDKLFIQLVQTYNQLFEENPINASGVDAKAILSARLSKSRRLENLIAQLPGEKKNGLFGNLIALSLGLTPNFKSNFDLAEDAKLQLSKDTYDDDLDNLLAQIGDQYADLFLAAKNLSDAILLSDILRVNTEITKAPLSASMIKRYDEHHQDLTLLKALVRQQLPEKYKEIFFDQSKNGYAGYIDGGASQEEFYKFIKPILEKMDGTEELLVKLNREDLLRKQRTFDNGSIPHQIHLGELHAILRRQEDFYPFLKDNREKIEKILTFRIPYYVGPLARGNSRFAWMTRKSEETITPWNFEEVVDKGASAQSFIERMTNFDKNLPNEKVLPKHSLLYEYFTVYNELTKVKYVTEGMRKPAFLSGEQKKAIVDLLFKTNRKVTVKQLKEDYFKKIECFDSVEISGVEDRFNASLGTYHDLLKIIKDKDFLDNEENEDILEDIVLTLTLFEDREMIEERLKTYAHLFDDKVMKQLKRRRYTGWGRLSRKLINGIRDKQSGKTILDFLKSDGFANRNFMQLIHDDSLTFKEDIQKAQVSGQGDSLHEHIANLAGSPAIKKGILQTVKVVDELVKVMGRHKPENIVIEMARENQTTQKGQKNSRERMKRIEEGIKELGSQILKEHPVENTQLQNEKLYLYYLQNGRDMYVDQELDINRLSDYDVDHIVPQSFLKDDSIDNKVLTRSDKARGKSDNVPSEEVVKKMKNYWRQLLNAKLITQRKFDNLTKAERGGLSELDKAGFIKRQLVETRQITKHVAQILDSRMNTKYDENDKLIREVKVITLKSKLVSDFRKDFQFYKVREINNYHHAHDAYLNAVVGTALIKKYPKLESEFVYGDYKVYDVRKMIAKSEQEIGKATAKYFFYSNIMNFFKTEITLANGEIRKRPLIETNGETGEIVWDKGRDFATVRKVLSMPQVNIVKKTEVQTGGFSKESILPKRNSDKLIARKKDWDPKKYGGFDSPTVAYSVLVVAKVEKGKSKKLKSVKELLGITIMERSSFEKNPIDFLEAKGYKEVKKDLIIKLPKYSLFELENGRKRMLASAGELQKGNELALPSKYVNFLYLASHYEKLKGSPEDNEQKQLFVEQHKHYLDEIIEQISEFSKRVILADANLDKVLSAYNKHRDKPIREQAENIIHLFTLTNLGAPAAFKYFDTTIDRKRYTSTKEVLDATLIHQSITGLYETRIDLSQLGGDGGGGSPAPGSSGGTLQLEEEYRLFEPESTQKQEMDIWLKNFPQAWAETGGMGTAHCQAPVLIQLKATATPISIRQYPMPHEAYQGIKPHIRRMLDQGILKPCQSPWNTPLLPVKKPGTEDYRPVQDLREVNKRVEDIHPTVPNPYNLLSTLPPSHPWYTVLDLKDAFFCLRLHSESQLLFAFEWRDPEIGLSGQLTWTRLPQGFKNSPTLFNEALHSDLADFRVRYPALVLLQYVDDLLLAAATRTECLEGTKALLETLGNKGYRASAKKAQICLQEVTYLGYSLKDGQRWLTKARKEAILSIPVPKNSRQVREFLGTAGYCRLWIPGFAELAAPLYPLTRPGTLFQWGTEQQLAFEDIKKALLSSPALGLPDITKPFELFIDENSGFAKGVLVQKLGPWKRPVAYLSKKLDTVASGWPPCLRMVAAIAILVKDAGKLTLGQPLTILTSHPVEALVRQPPNKWLSNARMTHYQAMLLDAERVHFGPTVSLNPATLLPLPSGGNHHDCLQILAETHGTRPDLTDQPLPDADLTWYTDGSSFIRNGEREAGAAVTTESEVIWAAPLPPGTSAQRAELIALTQALKMAEGKKLTVYTDSRYAFATTHVHGEIYRRRGWLTSEGKEIKNKNEILALLEALFLPKRLSIIHCPGHQKGDSPQAKGNRLADDTAKKAATETHSSLTVLPAGKRTADGSEFEKRTADGSEFESPKKKAKVE

SEQ ID NO: 7139 - protein, 2094 aa, synthetic construct
MPAAKRVKLDGGDKKYSIGLDIGTNSVGWAVITDEYKVPSKKFKVLGNTDRHSIKKNLIGALLFDSGETAEATRLKRTARRRYTRRKNRICYLQEIFSNEMAKVDDSFFHRLEESFLVEEDKKHERHPIFGNIVDEVAYHEKYPTIYHLRKKLVDSTDKADLRLIYLALAHMIKFRGHFLIEGDLNPDNSDVDKLFIQLVQTYNQLFEENPINASGVDAKAILSARLSKSRRLENLIAQLPGEKKNGLFGNLIALSLGLTPNFKSNFDLAEDAKLQLSKDTYDDDLDNLLAQIGDQYADLFLAAKNLSDAILLSDILRVNTEITKAPLSASMIKRYDEHHQDLTLLKALVRQQLPEKYKEIFFDQSKNGYAGYIDGGASQEEFYKFIKPILEKMDGTEELLVKLNREDLLRKQRTFDNGSIPHQIHLGELHAILRRQEDFYPFLKDNREKIEKILTFRIPYYVGPLARGNSRFAWMTRKSEETITPWNFEEVVDKGASAQSFIERMTNFDKNLPNEKVLPKHSLLYEYFTVYNELTKVKYVTEGMRKPAFLSGEQKKAIVDLLFKTNRKVTVKQLKEDYFKKIECFDSVEISGVEDRFNASLGTYHDLLKIIKDKDFLDNEENEDILEDIVLTLTLFEDREMIEERLKTYAHLFDDKVMKQLKRRRYTGWGRLSRKLINGIRDKQSGKTILDFLKSDGFANRNFMQLIHDDSLTFKEDIQKAQVSGQGDSLHEHIANLAGSPAIKKGILQTVKVVDELVKVMGRHKPENIVIEMARENQTTQKGQKNSRERMKRIEEGIKELGSQILKEHPVENTQLQNEKLYLYYLQNGRDMYVDQELDINRLSDYDVDHIVPQSFLKDDSIDNKVLTRSDKARGKSDNVPSEEVVKKMKNYWRQLLNAKLITQRKFDNLTKAERGGLSELDKAGFIKRQLVETRQITKHVAQILDSRMNTKYDENDKLIREVKVITLKSKLVSDFRKDFQFYKVREINNYHHAHDAYLNAVVGTALIKKYPKLESEFVYGDYKVYDVRKMIAKSEQEIGKATAKYFFYSNIMNFFKTEITLANGEIRKRPLIETNGETGEIVWDKGRDFATVRKVLSMPQVNIVKKTEVQTGGFSKESILPKRNSDKLIARKKDWDPKKYGGFDSPTVAYSVLVVAKVEKGKSKKLKSVKELLGITIMERSSFEKNPIDFLEAKGYKEVKKDLIIKLPKYSLFELENGRKRMLASAGELQKGNELALPSKYVNFLYLASHYEKLKGSPEDNEQKQLFVEQHKHYLDEIIEQISEFSKRVILADANLDKVLSAYNKHRDKPIREQAENIIHLFTLTNLGAPAAFKYFDTTIDRKRYTSTKEVLDATLIHQSITGLYETRIDLSQLGGDGGGGSPAPGSSGGTLNLEDEYRLYETSAEPEVSPGSTWLSDFPQAWAETGGMGLAVRQAPLIIPLKATSTPVSIKQYPMSQEAKLGIKPHIQRLLDQGILVPCQSPWNTPLLPVKKPGTNDYRPVQDLREVNKRVEDIHPTVPNPYNLLSGLPPSHRWYTVLDLKDAFFCLRLHPTSQPLFAFEWRDPGMGISGQLTWTRLPQGFKNSPTLFNEALHRDLADFRIQHPDLILLQYVDDILLAATSELDCQQGTRALLLTLGNLGYRASAKKAQLCQKQVKYLGYLLKEGQRWLTEARKETVMGQPTPKTPRQLREFLGTAGFCRLWIPGFAEMAAPLYPLTKPGTLFNWGPDQQKAYQEIKQALLTAPALGLPDLTKPFELFVDEKQGYAKGVLTQKLGPWRRPVAYLSKKLDPVAAGWPPCLRMVAAIAVLRKDAGKLTMGQPLVILAPHAVEALVKQPPDRWLSNARMTHYQAMLLDTDRVQFGPVVALNPATLLPLPEEGAPHDCLEILAETHGTRPDLTDQPIPDADHTWYTDGSSFLQEGQRKAGAAVTTETEVIWARALPAGTSAQRAELIALTQALKMAEGKRLNVYTDSRYAFATAHIHGEIYRRRGWLTSEGREIKNKSEILALLKALFLPKRLSIIHCLGHQKGDSAEARGNRLADQAAREAAIKTPPDTSTLLAGKRTADGSEFEKRTADGSEFESPKKKAKVE

SEQ ID NO: 7140 - protein, 2094 aa, synthetic construct
MPAAKRVKLDGGDKKYSIGLDIGTNSVGWAVITDEYKVPSKKFKVLGNTDRHSIKKNLIGALLFDSGETAEATRLKRTARRRYTRRKNRICYLQEIFSNEMAKVDDSFFHRLEESFLVEEDKKHERHPIFGNIVDEVAYHEKYPTIYHLRKKLVDSTDKADLRLIYLALAHMIKFRGHFLIEGDLNPDNSDVDKLFIQLVQTYNQLFEENPINASGVDAKAILSARLSKSRRLENLIAQLPGEKKNGLFGNLIALSLGLTPNFKSNFDLAEDAKLQLSKDTYDDDLDNLLAQIGDQYADLFLAAKNLSDAILLSDILRVNTEITKAPLSASMIKRYDEHHQDLTLLKALVRQQLPEKYKEIFFDQSKNGYAGYIDGGASQEEFYKFIKPILEKMDGTEELLVKLNREDLLRKQRTFDNGSIPHQIHLGELHAILRRQEDFYPFLKDNREKIEKILTFRIPYYVGPLARGNSRFAWMTRKSEETITPWNFEEVVDKGASAQSFIERMTNFDKNLPNEKVLPKHSLLYEYFTVYNELTKVKYVTEGMRKPAFLSGEQKKAIVDLLFKTNRKVTVKQLKEDYFKKIECFDSVEISGVEDRFNASLGTYHDLLKIIKDKDFLDNEENEDILEDIVLTLTLFEDREMIEERLKTYAHLFDDKVMKQLKRRRYTGWGRLSRKLINGIRDKQSGKTILDFLKSDGFANRNFMQLIHDDSLTFKEDIQKAQVSGQGDSLHEHIANLAGSPAIKKGILQTVKVVDELVKVMGRHKPENIVIEMARENQTTQKGQKNSRERMKRIEEGIKELGSQILKEHPVENTQLQNEKLYLYYLQNGRDMYVDQELDINRLSDYDVDHIVPQSFLKDDSIDNKVLTRSDKARGKSDNVPSEEVVKKMKNYWRQLLNAKLITQRKFDNLTKAERGGLSELDKAGFIKRQLVETRQITKHVAQILDSRMNTKYDENDKLIREVKVITLKSKLVSDFRKDFQFYKVREINNYHHAHDAYLNAVVGTALIKKYPKLESEFVYGDYKVYDVRKMIAKSEQEIGKATAKYFFYSNIMNFFKTEITLANGEIRKRPLIETNGETGEIVWDKGRDFATVRKVLSMPQVNIVKKTEVQTGGFSKESILPKRNSDKLIARKKDWDPKKYGGFDSPTVAYSVLVVAKVEKGKSKKLKSVKELLGITIMERSSFEKNPIDFLEAKGYKEVKKDLIIKLPKYSLFELENGRKRMLASAGELQKGNELALPSKYVNFLYLASHYEKLKGSPEDNEQKQLFVEQHKHYLDEIIEQISEFSKRVILADANLDKVLSAYNKHRDKPIREQAENIIHLFTLTNLGAPAAFKYFDTTIDRKRYTSTKEVLDATLIHQSITGLYETRIDLSQLGGDGGGGSPAPGSSGGTLNIEDEYRLHETSKGPDVPLGSTWLSDFPQAWAETGGMGLAVRQAPLIIPLKATSTPVSIKQYPMSQEARLGIKPHIQRLLDQGILVPCQSPWNTPLLPVKKPGTNDYRPVQDLREVNKRVEDIHPTVPNPYNLLSGLPPSHQWYTVLDLKDAFFCLRLHPTSQSLFAFEWRDPEMGISGQLTWTRLPQGFKNSPTLFNEALHRDLADFRIQHPDLILLQYVDDLLLAATSELDCQQGTRALLQTLGDLGYRASAKKAQICQKQVKYLGYLLKEGQRWLTEARKETVMGQPTPKTPRQLREFLGTAGFCRLWIPGFAEMAAPLYPLTKPGTLFEWGPDQQKAYQEIKQALLTAPALGLPDLTKPFELFVDEKQGYAKGVLTQKLGPWRRPVAYLSKKLDPVAAGWPPCLRMVAAIAVLTKDAGKLTMGQPLVILAPHAVEALVKQPPDRWLSNARMTHYQALLLDTDRVQFGPIVALNPATLLPLPEEGLQHDCLDILAEAHGTRPDLTDQPLPDADHTWYTDGSSFLQEGQRKAGAAVTTETEVVWAKALPAGTSAQRAELIALTQALKMAEGKKLNVYTDSRYAFATAHIHGEIYRRRGWLTSEGKEIKNKDEILALLKALFLPKRLSIIHCPGHQKGNRAEARGNRMADQAAREVATRETPETSTLLAGKRTADGSEFEKRTADGSEFESPKKKAKVE

SEQ ID NO: 7141 - protein, 2092 aa, synthetic construct
MPAAKRVKLDGGDKKYSIGLDIGTNSVGWAVITDEYKVPSKKFKVLGNTDRHSIKKNLIGALLFDSGETAEATRLKRTARRRYTRRKNRICYLQEIFSNEMAKVDDSFFHRLEESFLVEEDKKHERHPIFGNIVDEVAYHEKYPTIYHLRKKLVDSTDKADLRLIYLALAHMIKFRGHFLIEGDLNPDNSDVDKLFIQLVQTYNQLFEENPINASGVDAKAILSARLSKSRRLENLIAQLPGEKKNGLFGNLIALSLGLTPNFKSNFDLAEDAKLQLSKDTYDDDLDNLLAQIGDQYADLFLAAKNLSDAILLSDILRVNTEITKAPLSASMIKRYDEHHQDLTLLKALVRQQLPEKYKEIFFDQSKNGYAGYIDGGASQEEFYKFIKPILEKMDGTEELLVKLNREDLLRKQRTFDNGSIPHQIHLGELHAILRRQEDFYPFLKDNREKIEKILTFRIPYYVGPLARGNSRFAWMTRKSEETITPWNFEEVVDKGASAQSFIERMTNFDKNLPNEKVLPKHSLLYEYFTVYNELTKVKYVTEGMRKPAFLSGEQKKAIVDLLFKTNRKVTVKQLKEDYFKKIECFDSVEISGVEDRFNASLGTYHDLLKIIKDKDFLDNEENEDILEDIVLTLTLFEDREMIEERLKTYAHLFDDKVMKQLKRRRYTGWGRLSRKLINGIRDKQSGKTILDFLKSDGFANRNFMQLIHDDSLTFKEDIQKAQVSGQGDSLHEHIANLAGSPAIKKGILQTVKVVDELVKVMGRHKPENIVIEMARENQTTQKGQKNSRERMKRIEEGIKELGSQILKEHPVENTQLQNEKLYLYYLQNGRDMYVDQELDINRLSDYDVDHIVPQSFLKDDSIDNKVLTRSDKARGKSDNVPSEEVVKKMKNYWRQLLNAKLITQRKFDNLTKAERGGLSELDKAGFIKRQLVETRQITKHVAQILDSRMNTKYDENDKLIREVKVITLKSKLVSDFRKDFQFYKVREINNYHHAHDAYLNAVVGTALIKKYPKLESEFVYGDYKVYDVRKMIAKSEQEIGKATAKYFFYSNIMNFFKTEITLANGEIRKRPLIETNGETGEIVWDKGRDFATVRKVLSMPQVNIVKKTEVQTGGFSKESILPKRNSDKLIARKKDWDPKKYGGFDSPTVAYSVLVVAKVEKGKSKKLKSVKELLGITIMERSSFEKNPIDFLEAKGYKEVKKDLIIKLPKYSLFELENGRKRMLASAGELQKGNELALPSKYVNFLYLASHYEKLKGSPEDNEQKQLFVEQHKHYLDEIIEQISEFSKRVILADANLDKVLSAYNKHRDKPIREQAENIIHLFTLTNLGAPAAFKYFDTTIDRKRYTSTKEVLDATLIHQSITGLYETRIDLSQLGGDGGGGSPAPGSSGGVLNLEEEYRLHEKPVPSSIDPSWLQLFPTVWAERAGMGLANQVPPVVVELRSGASPVAVRQYPMSKEAREGIRPHIQRFLDLGVLVPCQSPWNTPLLPVKKPGTNDYRPVQDLREINKRVQDIHPTVPNPYNLLSSLPPSHTWYSVLDLKDAFFCLKLHPNSQPLFAFEWRDPEKGNTGQLTWTRLPQGFKNSPTLFNEALHRDLAPFRALNPQVVLLQYVDDLLVAAPTYRDCKEGTQKLLQELSKLGYRVSAKKAQLCQKEVTYLGYLLKEGKRWLTPARKATVMKIPPPTTPRQVREFLGTAGFCRLWIPGFASLAAPLYPLTKPSIPFIWTEEHQKAFDRIKEALLSAPALALPDLTKPFTLYVDERAGVARGVLTQTLGPWRRPVAYLSKKLDPVASGWPTCLKAVAAVALLLKDADKLTLGQNVTVIASHSLESIVRQPPDRWMTNARMTHYQSLLLNERVSFAPPAVLNPATLLPVESEATPVHRCSEILAEETGTRRDLKDQPLPGVPAWYTDGSSFIAEGKRRAGAAIVDGKRTVWASSLPEGTSAQKAELVALTQALRLAEGKDINIYTDSRYAFATAHIHGAIYKQRGWLTSAGKDIKNKEEILALLEAIHLPKRVAIIHCPGHQKGNDPVATGNRRADEAAKQAALSTRVLAETTKPAGKRTADGSEFEKRTADGSEFESPKKKAKVE

SEQ ID NO: 7142 - protein, 2094 aa, synthetic construct; identical to SEQ ID NO: 4525

SEQ ID NO: 7143 - protein, 2096 aa, synthetic construct
MPAAKRVKLDGGDKKYSIGLDIGTNSVGWAVITDEYKVPSKKFKVLGNTDRHSIKKNLIGALLFDSGETAEATRLKRTARRRYTRRKNRICYLQEIFSNEMAKVDDSFFHRLEESFLVEEDKKHERHPIFGNIVDEVAYHEKYPTIYHLRKKLVDSTDKADLRLIYLALAHMIKFRGHFLIEGDLNPDNSDVDKLFIQLVQTYNQLFEENPINASGVDAKAILSARLSKSRRLENLIAQLPGEKKNGLFGNLIALSLGLTPNFKSNFDLAEDAKLQLSKDTYDDDLDNLLAQIGDQYADLFLAAKNLSDAILLSDILRVNTEITKAPLSASMIKRYDEHHQDLTLLKALVRQQLPEKYKEIFFDQSKNGYAGYIDGGASQEEFYKFIKPILEKMDGTEELLVKLNREDLLRKQRTFDNGSIPHQIHLGELHAILRRQEDFYPFLKDNREKIEKILTFRIPYYVGPLARGNSRFAWMTRKSEETITPWNFEEVVDKGASAQSFIERMTNFDKNLPNEKVLPKHSLLYEYFTVYNELTKVKYVTEGMRKPAFLSGEQKKAIVDLLFKTNRKVTVKQLKEDYFKKIECFDSVEISGVEDRFNASLGTYHDLLKIIKDKDFLDNEENEDILEDIVLTLTLFEDREMIEERLKTYAHLFDDKVMKQLKRRRYTGWGRLSRKLINGIRDKQSGKTILDFLKSDGFANRNFMQLIHDDSLTFKEDIQKAQVSGQGDSLHEHIANLAGSPAIKKGILQTVKVVDELVKVMGRHKPENIVIEMARENQTTQKGQKNSRERMKRIEEGIKELGSQILKEHPVENTQLQNEKLYLYYLQNGRDMYVDQELDINRLSDYDVDHIVPQSFLKDDSIDNKVLTRSDKARGKSDNVPSEEVVKKMKNYWRQLLNAKLITQRKFDNLTKAERGGLSELDKAGFIKRQLVETRQITKHVAQILDSRMNTKYDENDKLIREVKVITLKSKLVSDFRKDFQFYKVREINNYHHAHDAYLNAVVGTALIKKYPKLESEFVYGDYKVYDVRKMIAKSEQEIGKATAKYFFYSNIMNFFKTEITLANGEIRKRPLIETNGETGEIVWDKGRDFATVRKVLSMPQVNIVKKTEVQTGGFSKESILPKRNSDKLIARKKDWDPKKYGGFDSPTVAYSVLVVAKVEKGKSKKLKSVKELLGITIMERSSFEKNPIDFLEAKGYKEVKKDLIIKLPKYSLFELENGRKRMLASAGELQKGNELALPSKYVNFLYLASHYEKLKGSPEDNEQKQLFVEQHKHYLDEIIEQISEFSKRVILADANLDKVLSAYNKHRDKPIREQAENIIHLFTLTNLGAPAAFKYFDTTIDRKRYTSTKEVLDATLIHQSITGLYETRIDLSQLGGDGGGSSGGSPAPGGTAPLEEEYRLFLEAPIQNVTLLEQWKREIPKVWAEINPPGLASTQAPIHVQLLSTALPVRVRQYPITLEAKRSLRETIRKFRAAGILRPVHSPWNTPLLPVRKSGTSEYRMVQDLREVNKRVETIHPTVPNPYTLLSLLPPDRIWYSVLDLKDAFFCIPLAPESQLIFAFEWADAEEGESGQLTWTRLPQGFKNSPTLFNEALNRDLQGFRLDHPSVSLLQYVDDLLIAADTQAACLSATRDLLMTLAELGYRVSGKKAQLCQEEVTYLGFKIHKGSRSLSNSRTQAILQIPVPKTKRQVREFLGKIGYCRLFIPGFAELAQPLYAATRPGNDPLVWGEKEEEAFQSLKLALTQPPALALPSLDKPFQLFVEETSGAAKGVLTQALGPWKRPVAYLSKRLDPVAAGWPRCLRAIAAAALLTREASKLTFGQDIEITSSHNLESLLRSPPDKWLTNARITQYQVLLLDPPRVRFKQTAALNPATLLPETDDTLPIHHCLDTLDSLTSTRPDLTDQPLAQAEATLFTDGSSYIRDGKRYAGAAVVTLDSVIWAEPLPIGTSAQKAELIALTKALEWSKDKSVNIYTDSRYAFATLHVHGMIYRERGWLTAGGKAIKNAPEILALLTAVWLPKRVAVMHCKGHQKDDAPTSTGNRRADEVAREVAIRPLSTQATISAGKRTADGSEFEKRTADGSEFESPKKKAKVE

SEQ ID NO: 7144 - protein, 2093 aa, synthetic construct
MPAAKRVKLDGGDKKYSIGLDIGTNSVGWAVITDEYKVPSKKFKVLGNTDRHSIKKNLIGALLFDSGETAEATRLKRTARRRYTRRKNRICYLQEIFSNEMAKVDDSFFHRLEESFLVEEDKKHERHPIFGNIVDEVAYHEKYPTIYHLRKKLVDSTDKADLRLIYLALAHMIKFRGHFLIEGDLNPDNSDVDKLFIQLVQTYNQLFEENPINASGVDAKAILSARLSKSRRLENLIAQLPGEKKNGLFGNLIALSLGLTPNFKSNFDLAEDAKLQLSKDTYDDDLDNLLAQIGDQYADLFLAAKNLSDAILLSDILRVNTEITKAPLSASMIKRYDEHHQDLTLLKALVRQQLPEKYKEIFFDQSKNGYAGYIDGGASQEEFYKFIKPILEKMDGTEELLVKLNREDLLRKQRTFDNGSIPHQIHLGELHAILRRQEDFYPFLKDNREKIEKILTFRIPYYVGPLARGNSRFAWMTRKSEETITPWNFEEVVDKGASAQSFIERMTNFDKNLPNEKVLPKHSLLYEYFTVYNELTKVKYVTEGMRKPAFLSGEQKKAIVDLLFKTNRKVTVKQLKEDYFKKIECFDSVEISGVEDRFNASLGTYHDLLKIIKDKDFLDNEENEDILEDIVLTLTLFEDREMIEERLKTYAHLFDDKVMKQLKRRRYTGWGRLSRKLINGIRDKQSGKTILDFLKSDGFANRNFMQLIHDDSLTFKEDIQKAQVSGQGDSLHEHIANLAGSPAIKKGILQTVKVVDELVKVMGRHKPENIVIEMARENQTTQKGQKNSRERMKRIEEGIKELGSQILKEHPVENTQLQNEKLYLYYLQNGRDMYVDQELDINRLSDYDVDHIVPQSFLKDDSIDNKVLTRSDKARGKSDNVPSEEVVKKMKNYWRQLLNAKLITQRKFDNLTKAERGGLSELDKAGFIKRQLVETRQITKHVAQILDSRMNTKYDENDKLIREVKVITLKSKLVSDFRKDFQFYKVREINNYHHAHDAYLNAVVGTALIKKYPKLESEFVYGDYKVYDVRKMIAKSEQEIGKATAKYFFYSNIMNFFKTEITLANGEIRKRPLIETNGETGEIVWDKGRDFATVRKVLSMPQVNIVKKTEVQTGGFSKESILPKRNSDKLIARKKDWDPKKYGGFDSPTVAYSVLVVAKVEKGKSKKLKSVKELLGITIMERSSFEKNPIDFLEAKGYKEVKKDLIIKLPKYSLFELENGRKRMLASAGELQKGNELALPSKYVNFLYLASHYEKLKGSPEDNEQKQLFVEQHKHYLDEIIEQISEFSKRVILADANLDKVLSAYNKHRDKPIREQAENIIHLFTLTNLGAPAAFKYFDTTIDRKRYTSTKEVLDATLIHQSITGLYETRIDLSQLGGDGGGSSGGSPAPGGTLQLEEEYRLFEPESTQKQEMDIWLKNFPQAWAETGGMGTAHCQAPVLIQLKATATPISIRQYPMPHEAYQGIKPHIRRMLDQGILKPCQSPWNTPLLPVKKPGTEDYRPVQDLREVNKRVEDIHPTVPNPYNLLSTLPPSHPWYTVLDLKDAFFCLRLHSESQLLFAFEWRDPEIGLSGQLTWTRLPQGFKNSPTLFNEALHSDLADFRVRYPALVLLQYVDDLLLAAATRTECLEGTKALLETLGNKGYRASAKKAQICLQEVTYLGYSLKDGQRWLTKARKEAILSIPVPKNSRQVREFLGKAGYCRLFIPGFAELAAPLYPLTRPGTLFQWGTEQQLAFEDIKKALLSSPALGLPDITKPFELFIDENSGFAKGVLVQKLGPWKRPVAYLSKKLDTVASGWPPCLRMVAAIAILVKDAGKLTLGQPLTILTSHPVEALVRQPPNKWLSNARMTHYQAMLLDAERVHFGPTVSLNPATLLPLPSGGNHHDCLQILAETHGTRPDLTDQPLPDADLTWYTDGSSFIRNGEREAGAAVTTESEVIWAAPLPPGTSAQRAELIALTQALKMAEGKKLTVYTDSRYAFATTHVHGEIYRRRGWLTSEGKEIKNKNEILALLEALFLPKRLSIIHCPGHQKGDSPQAKGNRLADDTAKKAATETHSSLTVLPAGKRTADGSEFEKRTADGSEFESPKKKAKVE

SEQ ID NO: 7145 - protein, 2174 aa, synthetic construct
MPAAKRVKLDGGDKKYSIGLDIGTNSVGWAVITDEYKVPSKKFKVLGNTDRHSIKKNLIGALLFDSGETAEATRLKRTARRRYTRRKNRICYLQEIFSNEMAKVDDSFFHRLEESFLVEEDKKHERHPIFGNIVDEVAYHEKYPTIYHLRKKLVDSTDKADLRLIYLALAHMIKFRGHFLIEGDLNPDNSDVDKLFIQLVQTYNQLFEENPINASGVDAKAILSARLSKSRRLENLIAQLPGEKKNGLFGNLIALSLGLTPNFKSNFDLAEDAKLQLSKDTYDDDLDNLLAQIGDQYADLFLAAKNLSDAILLSDILRVNTEITKAPLSASMIKRYDEHHQDLTLLKALVRQQLPEKYKEIFFDQSKNGYAGYIDGGASQEEFYKFIKPILEKMDGTEELLVKLNREDLLRKQRTFDNGSIPHQIHLGELHAILRRQEDFYPFLKDNREKIEKILTFRIPYYVGPLARGNSRFAWMTRKSEETITPWNFEEVVDKGASAQSFIERMTNFDKNLPNEKVLPKHSLLYEYFTVYNELTKVKYVTEGMRKPAFLSGEQKKAIVDLLFKTNRKVTVKQLKEDYFKKIECFDSVEISGVEDRFNASLGTYHDLLKIIKDKDFLDNEENEDILEDIVLTLTLFEDREMIEERLKTYAHLFDDKVMKQLKRRRYTGWGRLSRKLINGIRDKQSGKTILDFLKSDGFANRNFMQLIHDDSLTFKEDIQKAQVSGQGDSLHEHIANLAGSPAIKKGILQTVKVVDELVKVMGRHKPENIVIEMARENQTTQKGQKNSRERMKRIEEGIKELGSQILKEHPVENTQLQNEKLYLYYLQNGRDMYVDQELDINRLSDYDVDHIVPQSFLKDDSIDNKVLTRSDKARGKSDNVPSEEVVKKMKNYWRQLLNAKLITQRKFDNLTKAERGGLSELDKAGFIKRQLVETRQITKHVAQILDSRMNTKYDENDKLIREVKVITLKSKLVSDFRKDFQFYKVREINNYHHAHDAYLNAVVGTALIKKYPKLESEFVYGDYKVYDVRKMIAKSEQEIGKATAKYFFYSNIMNFFKTEITLANGEIRKRPLIETNGETGEIVWDKGRDFATVRKVLSMPQVNIVKKTEVQTGGFSKESILPKRNSDKLIARKKDWDPKKYGGFDSPTVAYSVLVVAKVEKGKSKKLKSVKELLGITIMERSSFEKNPIDFLEAKGYKEVKKDLIIKLPKYSLFELENGRKRMLASAGELQKGNELALPSKYVNFLYLASHYEKLKGSPEDNEQKQLFVEQHKHYLDEIIEQISEFSKRVILADANLDKVLSAYNKHRDKPIREQAENIIHLFTLTNLGAPAAFKYFDTTIDRKRYTSTKEVLDATLIHQSITGLYETRIDLSQLGGDGGGSSGGSPAPGGMNPLQLLQPLPAEIKGTKLLAHWNSGATITCIPESFLEDEQPIKKTLIKTIHGEKQQNVYYVTFKVKGRKVEAEVIASPYEYILLSPTDVPWLTQQPLQLTILVPLQEYQEKILSKTALPEDQKQQLKTLFVKYDNLWQHWENQVGHRKIRPHNIATGDYPPRPQKQYPINPKAKPSIQIVIDDLLKQGVLTPQNSTMNTPVYPVPKPDGRWRMVLDYREVNKTIPLTAAQNQHSAGILATIVRQKYKTTLDLANGFWAHPITPESYWLTAFTWQGKQYCWTRLPQGFLNSPALFNADVVDLLKEIPNVQVYVDDIYLSHDDPKEHVQQLEKVFQILLQAGYVVSLKKSEIGQKTVEFLGFNITKEGRGLTDTFKTKLLNITPPKDLKQLQSILGKLNFARNFIPNFAELVQPLYNLIAPAKGKYIEWSEENTKQLNMVIEALNTASNLEERLPEQRLVIKVNTSPSAGYVRYYNETGKKPIMYLNYVFSKAELKFSMLEKLLTTMHKALIKAMDLAMGQEILVYSPIVSMTKIQKTPLPERKALPIRWITWMTYLEDPRIQFHYDKTLPELKHIPDVYTSSQSPVKHPSQYEGVFYTDGSAIKSPDPTKSNNAGMGIVHATYKPEYQVLNQWSIPLGNHTAQMAEIAAVEFACKKALKIPGPVLVITDSFYVAESANKELPYWKSNGFVNNKKKPLKHISKWKSIAECLSMKPDITIQHEKGISLQIPVFILKGNALADKLATQGSYVVNAGKRTADGSEFEKRTADGSEFESPKKKAKVE

SEQ ID NO: 7146 - protein, 2092 aa, synthetic construct
MPAAKRVKLDGGDKKYSIGLDIGTNSVGWAVITDEYKVPSKKFKVLGNTDRHSIKKNLIGALLFDSGETAEATRLKRTARRRYTRRKNRICYLQEIFSNEMAKVDDSFFHRLEESFLVEEDKKHERHPIFGNIVDEVAYHEKYPTIYHLRKKLVDSTDKADLRLIYLALAHMIKFRGHFLIEGDLNPDNSDVDKLFIQLVQTYNQLFEENPINASGVDAKAILSARLSKSRRLENLIAQLPGEKKNGLFGNLIALSLGLTPNFKSNFDLAEDAKLQLSKDTYDDDLDNLLAQIGDQYADLFLAAKNLSDAILLSDILRVNTEITKAPLSASMIKRYDEHHQDLTLLKALVRQQLPEKYKEIFFDQSKNGYAGYIDGGASQEEFYKFIKPILEKMDGTEELLVKLNREDLLRKQRTFDNGSIPHQIHLGELHAILRRQEDFYPFLKDNREKIEKILTFRIPYYVGPLARGNSRFAWMTRKSEETITPWNFEEVVDKGASAQSFIERMTNFDKNLPNEKVLPKHSLLYEYFTVYNELTKVKYVTEGMRKPAFLSGEQKKAIVDLLFKTNRKVTVKQLKEDYFKKIECFDSVEISGVEDRFNASLGTYHDLLKIIKDKDFLDNEENEDILEDIVLTLTLFEDREMIEERLKTYAHLFDDKVMKQLKRRRYTGWGRLSRKLINGIRDKQSGKTILDFLKSDGFANRNFMQLIHDDSLTFKEDIQKAQVSGQGDSLHEHIANLAGSPAIKKGILQTVKVVDELVKVMGRHKPENIVIEMARENQTTQKGQKNSRERMKRIEEGIKELGSQILKEHPVENTQLQNEKLYLYYLQNGRDMYVDQELDINRLSDYDVDHIVPQSFLKDDSIDNKVLTRSDKARGKSDNVPSEEVVKKMKNYWRQLLNAKLITQRKFDNLTKAERGGLSELDKAGFIKRQLVETRQITKHVAQILDSRMNTKYDENDKLIREVKVITLKSKLVSDFRKDFQFYKVREINNYHHAHDAYLNAVVGTALIKKYPKLESEFVYGDYKVYDVRKMIAKSEQEIGKATAKYFFYSNIMNFFKTEITLANGEIRKRPLIETNGETGEIVWDKGRDFATVRKVLSMPQVNIVKKTEVQTGGFSKESILPKRNSDKLIARKKDWDPKKYGGFDSPTVAYSVLVVAKVEKGKSKKLKSVKELLGITIMERSSFEKNPIDFLEAKGYKEVKKDLIIKLPKYSLFELENGRKRMLASAGELQKGNELALPSKYVNFLYLASHYEKLKGSPEDNEQKQLFVEQHKHYLDEIIEQISEFSKRVILADANLDKVLSAYNKHRDKPIREQAENIIHLFTLTNLGAPAAFKYFDTTIDRKRYTSTKEVLDATLIHQSITGLYETRIDLSQLGGDGGGSSGGSPAPGGVLNLEEEYRLHEKPVPSSIDPSWLQLFPTVWAERAGMGLANQVPPVVVELRSGASPVAVRQYPMSKEAREGIRPHIQKFLDLGVLVPCRSPWNTPLLPVKKPGTNDYRPVQDLREINKRVQDIHPTVPNPYNLLSSLPPSYTWYSVLDLKDAFFCLRLHPNSQPLFAFEWKDPEKGNTGQLTWTRLPQGFKNSPTLFNEALHRDLAPFRALNPQVVLLQYVDDLLVAAPTYEDCKKGTQKLLQELSKLGYRVSAKKAQLCQREVTYLGYLLKEGKRWLTPARKATVMKIPVPTTPRQVREFLGKAGFCRLFIPGFASLAAPLYPLTKPSIPFIWTEEHQQAFDHIKKALLSAPALALPDLTKPFTLYIDERAGVARGVLTQTLGPWRRPVAYLSKKLDPVASGWPTCLKAVAAVALLLKDADKLTLGQNVTVIASHSLESIVRQPPDRWMTNARMTHYQSLLLNERVSFAPPAVLNPATLLPVESEATPVHRCSEILAEETGTRRDLEDQPLPGVPTWYTDGSSFITEGKRRAGAPIVDGKRTVWASSLPEGTSAQKAELVALTQALRLAEGKNINIYTDSRYAFATAHIHGAIYKQRGWLTSAGKDIKNKEEILALLEAIHLPRRVAIIHCPGHQRGSNPVATGNRRADEAAKQAALSTRVLAGTTKPAGKRTADGSEFEKRTADGSEFESPKKKAKVE

SEQ ID NO: 7147 - protein, 2094 aa, synthetic construct
MPAAKRVKLDGGDKKYSIGLDIGTNSVGWAVITDEYKVPSKKFKVLGNTDRHSIKKNLIGALLFDSGETAEATRLKRTARRRYTRRKNRICYLQEIFSNEMAKVDDSFFHRLEESFLVEEDKKHERHPIFGNIVDEVAYHEKYPTIYHLRKKLVDSTDKADLRLIYLALAHMIKFRGHFLIEGDLNPDNSDVDKLFIQLVQTYNQLFEENPINASGVDAKAILSARLSKSRRLENLIAQLPGEKKNGLFGNLIALSLGLTPNFKSNFDLAEDAKLQLSKDTYDDDLDNLLAQIGDQYADLFLAAKNLSDAILLSDILRVNTEITKAPLSASMIKRYDEHHQDLTLLKALVRQQLPEKYKEIFFDQSKNGYAGYIDGGASQEEFYKFIKPILEKMDGTEELLVKLNREDLLRKQRTFDNGSIPHQIHLGELHAILRRQEDFYPFLKDNREKIEKILTFRIPYYVGPLARGNSRFAWMTRKSEETITPWNFEEVVDKGASAQSFIERMTNFDKNLPNEKVLPKHSLLYEYFTVYNELTKVKYVTEGMRKPAFLSGEQKKAIVDLLFKTNRKVTVKQLKEDYFKKIECFDSVEISGVEDRFNASLGTYHDLLKIIKDKDFLDNEENEDILEDIVLTLTLFEDREMIEERLKTYAHLFDDKVMKQLKRRRYTGWGRLSRKLINGIRDKQSGKTILDFLKSDGFANRNFMQLIHDDSLTFKEDIQKAQVSGQGDSLHEHIANLAGSPAIKKGILQTVKVVDELVKVMGRHKPENIVIEMARENQTTQKGQKNSRERMKRIEEGIKELGSQILKEHPVENTQLQNEKLYLYYLQNGRDMYVDQELDINRLSDYDVDHIVPQSFLKDDSIDNKVLTRSDKARGKSDNVPSEEVVKKMKNYWRQLLNAKLITQRKFDNLTKAERGGLSELDKAGFIKRQLVETRQITKHVAQILDSRMNTKYDENDKLIREVKVITLKSKLVSDFRKDFQFYKVREINNYHHAHDAYLNAVVGTALIKKYPKLESEFVYGDYKVYDVRKMIAKSEQEIGKATAKYFFYSNIMNFFKTEITLANGEIRKRPLIETNGETGEIVWDKGRDFATVRKVLSMPQVNIVKKTEVQTGGFSKESILPKRNSDKLIARKKDWDPKKYGGFDSPTVAYSVLVVAKVEKGKSKKLKSVKELLGITIMERSSFEKNPIDFLEAKGYKEVKKDLIIKLPKYSLFELENGRKRMLASAGELQKGNELALPSKYVNFLYLASHYEKLKGSPEDNEQKQLFVEQHKHYLDEIIEQISEFSKRVILADANLDKVLSAYNKHRDKPIREQAENIIHLFTLTNLGAPAAFKYFDTTIDRKRYTSTKEVLDATLIHQSITGLYETRIDLSQLGGDGGGSSGGSPAPGGTLNIEDEYRLHETSKEPDVSLGSTWLSDFPQAWAETGGMGLAVRQAPLIIPLKATSTPVSIKQYPMSQEARLGIKPHIQRLLDQGILVPCQSPWNTPLLPVKKPGTNDYRPVQDLREVNKRVEDIHPTVPNPYNLLSGLPPSHQWYTVLDLKDAFFCLRLHPTSQPLFAFEWRDPEMGISGQLTWTRLPQGFKNSPTLFNEALHRDLAGFRIQHPDLILLQYVDDLLLAATSELDCQQGTRALLQTLGDLGYRASAKKAQICQKQVKYLGYLLKEGQRWLTEARKETVMGQPIPKTPRQLREFLGTAGFCRLWIPGFAEMAAPLYPLTKPGTLFNWGPDQQKAFQEIKQALLTAPALGLPDLTKPFELFVDEKQGYAKGVLTQKLGPWRRPVAYLSKKLDPVAAGWPPCLRMVAAIAVLTKDAGKLTMGQPLVILAPHAVEALVKQPPDRWLSNARMTHYQALLLDTDRVQFGPVVALNPATLLPLPEEGLQHDCLDILAEAHGTRSDLMDQPLPDADHTWYTDGSSFLQEGQRKAGAAVTTETEVIWARALPAGTSAQRAELIALTQALKMAEGKKLNVYTDSRYAFATAHIHGEIYRRRGWLTSEGKEIKNKDEILALLKALFLPKRLSIIHCPGHQKGNSAEARGNRMADQAAREVATRETPETSTLLAGKRTADGSEFEKRTADGSEFESPKKKAKVE

SEQ ID NO: 7148 - protein, 2092 aa, synthetic construct
MPAAKRVKLDGGDKKYSIGLDIGTNSVGWAVITDEYKVPSKKFKVLGNTDRHSIKKNLIGALLFDSGETAEATRLKRTARRRYTRRKNRICYLQEIFSNEMAKVDDSFFHRLEESFLVEEDKKHERHPIFGNIVDEVAYHEKYPTIYHLRKKLVDSTDKADLRLIYLALAHMIKFRGHFLIEGDLNPDNSDVDKLFIQLVQTYNQLFEENPINASGVDAKAILSARLSKSRRLENLIAQLPGEKKNGLFGNLIALSLGLTPNFKSNFDLAEDAKLQLSKDTYDDDLDNLLAQIGDQYADLFLAAKNLSDAILLSDILRVNTEITKAPLSASMIKRYDEHHQDLTLLKALVRQQLPEKYKEIFFDQSKNGYAGYIDGGASQEEFYKFIKPILEKMDGTEELLVKLNREDLLRKQRTFDNGSIPHQIHLGELHAILRRQEDFYPFLKDNREKIEKILTFRIPYYVGPLARGNSRFAWMTRKSEETITPWNFEEVVDKGASAQSFIERMTNFDKNLPNEKVLPKHSLLYEYFTVYNELTKVKYVTEGMRKPAFLSGEQKKAIVDLLFKTNRKVTVKQLKEDYFKKIECFDSVEISGVEDRFNASLGTYHDLLKIIKDKDFLDNEENEDILEDIVLTLTLFEDREMIEERLKTYAHLFDDKVMKQLKRRRYTGWGRLSRKLINGIRDKQSGKTILDFLKSDGFANRNFMQLIHDDSLTFKEDIQKAQVSGQGDSLHEHIANLAGSPAIKKGILQTVKVVDELVKVMGRHKPENIVIEMARENQTTQKGQKNSRERMKRIEEGIKELGSQILKEHPVENTQLQNEKLYLYYLQNGRDMYVDQELDINRLSDYDVDHIVPQSFLKDDSIDNKVLTRSDKARGKSDNVPSEEVVKKMKNYWRQLLNAKLITQRKFDNLTKAERGGLSELDKAGFIKRQLVETRQITKHVAQILDSRMNTKYDENDKLIREVKVITLKSKLVSDFRKDFQFYKVREINNYHHAHDAYLNAVVGTALIKKYPKLESEFVYGDYKVYDVRKMIAKSEQEIGKATAKYFFYSNIMNFFKTEITLANGEIRKRPLIETNGETGEIVWDKGRDFATVRKVLSMPQVNIVKKTEVQTGGFSKESILPKRNSDKLIARKKDWDPKKYGGFDSPTVAYSVLVVAKVEKGKSKKLKSVKELLGITIMERSSFEKNPIDFLEAKGYKEVKKDLIIKLPKYSLFELENGRKRMLASAGELQKGNELALPSKYVNFLYLASHYEKLKGSPEDNEQKQLFVEQHKHYLDEIIEQISEFSKRVILADANLDKVLSAYNKHRDKPIREQAENIIHLFTLTNLGAPAAFKYFDTTIDRKRYTSTKEVLDATLIHQSITGLYETRIDLSQLGGDGGGSSGGSPAPGGVLNLEEEYRLHEKPVPSSIDPSWLQLFPTVWAERAGMGLANQVPPVVVELRSGASPVAVRQYPMSKEAREGIRPHIQRFLDLGVLVPCQSPWNTPLLPVKKPGTNDYRPVQDLREINKRVQDIHPTVPNPYNLLSSLPPSHTWYSVLDLKDAFFCLKLHPNSQPLFAFEWRDPEKGNTGQLTWTRLPQGFKNSPTLFNEALHRDLAPFRALNPQVVLLQYVDDLLVAAPTYRDCKEGTQKLLQELSKLGYRVSAKKAQLCQKEVTYLGYLLKEGKRWLTPARKATVMKIPPPTTPRQVREFLGTAGFCRLWIPGFASLAAPLYPLTKPSIPFIWTEEHQKAFDRIKEALLSAPALALPDLTKPFTLYVDERAGVARGVLTQTLGPWRRPVAYLSKKLDPVASGWPTCLKAVAAVALLLKDADKLTLGQNVTVIASHSLESIVRQPPDRWMTNARMTHYQSLLLNERVSFAPPAVLNPATLLPVESEATPVHRCSEILAEETGTRRDLKDQPLPGVPAWYTDGSSFIAEGKRRAGAAIVDGKRTVWASSLPEGTSAQKAELVALTQALRLAEGKDINIYTDSRYAFATAHIHGAIYKQRGWLTSAGKDIKNKEEILALLEAIHLPKRVAIIHCPGHQKGNDPVATGNRRADEAAKQAALSTRVLAETTKPAGKRTADGSEFEKRTADGSEFESPKKKAKVE

SEQ ID NO: 7149 - protein, 2092 aa, synthetic construct
MPAAKRVKLDGGDKKYSIGLDIGTNSVGWAVITDEYKVPSKKFKVLGNTDRHSIKKNLIGALLFDSGETAEATRLKRTARRRYTRRKNRICYLQEIFSNEMAKVDDSFFHRLEESFLVEEDKKHERHPIFGNIVDEVAYHEKYPTIYHLRKKLVDSTDKADLRLIYLALAHMIKFRGHFLIEGDLNPDNSDVDKLFIQLVQTYNQLFEENPINASGVDAKAILSARLSKSRRLENLIAQLPGEKKNGLFGNLIALSLGLTPNFKSNFDLAEDAKLQLSKDTYDDDLDNLLAQIGDQYADLFLAAKNLSDAILLSDILRVNTEITKAPLSASMIKRYDEHHQDLTLLKALVRQQLPEKYKEIFFDQSKNGYAGYIDGGASQEEFYKFIKPILEKMDGTEELLVKLNREDLLRKQRTFDNGSIPHQIHLGELHAILRRQEDFYPFLKDNREKIEKILTFRIPYYVGPLARGNSRFAWMTRKSEETITPWNFEEVVDKGASAQSFIERMTNFDKNLPNEKVLPKHSLLYEYFTVYNELTKVKYVTEGMRKPAFLSGEQKKAIVDLLFKTNRKVTVKQLKEDYFKKIECFDSVEISGVEDRFNASLGTYHDLLKIIKDKDFLDNEENEDILEDIVLTLTLFEDREMIEERLKTYAHLFDDKVMKQLKRRRYTGWGRLSRKLINGIRDKQSGKTILDFLKSDGFANRNFMQLIHDDSLTFKEDIQKAQVSGQGDSLHEHIANLAGSPAIKKGILQTVKVVDELVKVMGRHKPENIVIEMARENQTTQKGQKNSRERMKRIEEGIKELGSQILKEHPVENTQLQNEKLYLYYLQNGRDMYVDQELDINRLSDYDVDHIVPQSFLKDDSIDNKVLTRSDKARGKSDNVPSEEVVKKMKNYWRQLLNAKLITQRKFDNLTKAERGGLSELDKAGFIKRQLVETRQITKHVAQILDSRMNTKYDENDKLIREVKVITLKSKLVSDFRKDFQFYKVREINNYHHAHDAYLNAVVGTALIKKYPKLESEFVYGDYKVYDVRKMIAKSEQEIGKATAKYFFYSNIMNFFKTEITLANGEIRKRPLIETNGETGEIVWDKGRDFATVRKVLSMPQVNIVKKTEVQTGGFSKESILPKRNSDKLIARKKDWDPKKYGGFDSPTVAYSVLVVAKVEKGKSKKLKSVKELLGITIMERSSFEKNPIDFLEAKGYKEVKKDLIIKLPKYSLFELENGRKRMLASAGELQKGNELALPSKYVNFLYLASHYEKLKGSPEDNEQKQLFVEQHKHYLDEIIEQISEFSKRVILADANLDKVLSAYNKHRDKPIREQAENIIHLFTLTNLGAPAAFKYFDTTIDRKRYTSTKEVLDATLIHQSITGLYETRIDLSQLGGDGGGSSGGSPAPGGVLNLEEEYRLHEKPVPSSIDPSWLQLFPTVWAERAGMGLANQVPPVVVELRSGASPVAVRQYPMSKEAREGIRPHIQRFLDLGVLVPCQSPWNTPLLPVKKPGTNDYRPVQDLREINKRVQDIHPTVPNPYNLLSSLPPSHTWYSVLDLKDAFFCLKLHPNSQPLFAFEWRDPEKGNTGQLTWTRLPQGFKNSPTLFNEALHRDLAPFRALNPQVVLLQYVDDLLVAAPTYRDCKEGTQKLLQELSKLGYRVSAKKAQLCQKEVTYLGYLLKEGKRWLTPARKATVMKIPPPTTPRQVREFLGKAGFCRLFIPGFASLAAPLYPLTKPSIPFIWTEEHQKAFDRIKEALLSAPALALPDLTKPFTLYVDERAGVARGVLTQTLGPWRRPVAYLSKKLDPVASGWPTCLKAVAAVALLLKDADKLTLGQNVTVIASHSLESIVRQPPDRWMTNARMTHYQSLLLNERVSFAPPAVLNPATLLPVESEATPVHRCSEILAEETGTRRDLKDQPLPGVPAWYTDGSSFIAEGKRRAGAAIVDGKRTVWASSLPEGTSAQKAELVALTQALRLAEGKDINIYTDSRYAFATAHIHGAIYKQRGWLTSAGKDIKNKEEILALLEAIHLPKRVAIIHCPGHQKGNDPVATGNRRADEAAKQAALSTRVLAETTKPAGKRTADGSEFEKRTADGSEFESPKKKAKVE

SEQ ID NO: 7150 - protein, 2094 aa, synthetic construct
MPAAKRVKLDGGDKKYSIGLDIGTNSVGWAVITDEYKVPSKKFKVLGNTDRHSIKKNLIGALLFDSGETAEATRLKRTARRRYTRRKNRICYLQEIFSNEMAKVDDSFFHRLEESFLVEEDKKHERHPIFGNIVDEVAYHEKYPTIYHLRKKLVDSTDKADLRLIYLALAHMIKFRGHFLIEGDLNPDNSDVDKLFIQLVQTYNQLFEENPINASGVDAKAILSARLSKSRRLENLIAQLPGEKKNGLFGNLIALSLGLTPNFKSNFDLAEDAKLQLSKDTYDDDLDNLLAQIGDQYADLFLAAKNLSDAILLSDILRVNTEITKAPLSASMIKRYDEHHQDLTLLKALVRQQLPEKYKEIFFDQSKNGYAGYIDGGASQEEFYKFIKPILEKMDGTEELLVKLNREDLLRKQRTFDNGSIPHQIHLGELHAILRRQEDFYPFLKDNREKIEKILTFRIPYYVGPLARGNSRFAWMTRKSEETITPWNFEEVVDKGASAQSFIERMTNFDKNLPNEKVLPKHSLLYEYFTVYNELTKVKYVTEGMRKPAFLSGEQKKAIVDLLFKTNRKVTVKQLKEDYFKKIECFDSVEISGVEDRFNASLGTYHDLLKIIKDKDFLDNEENEDILEDIVLTLTLFEDREMIEERLKTYAHLFDDKVMKQLKRRRYTGWGRLSRKLINGIRDKQSGKTILDFLKSDGFANRNFMQLIHDDSLTFKEDIQKAQVSGQGDSLHEHIANLAGSPAIKKGILQTVKVVDELVKVMGRHKPENIVIEMARENQTTQKGQKNSRERMKRIEEGIKELGSQILKEHPVENTQLQNEKLYLYYLQNGRDMYVDQELDINRLSDYDVDHIVPQSFLKDDSIDNKVLTRSDKARGKSDNVPSEEVVKKMKNYWRQLLNAKLITQRKFDNLTKAERGGLSELDKAGFIKRQLVETRQITKHVAQILDSRMNTKYDENDKLIREVKVITLKSKLVSDFRKDFQFYKVREINNYHHAHDAYLNAVVGTALIKKYPKLESEFVYGDYKVYDVRKMIAKSEQEIGKATAKYFFYSNIMNFFKTEITLANGEIRKRPLIETNGETGEIVWDKGRDFATVRKVLSMPQVNIVKKTEVQTGGFSKESILPKRNSDKLIARKKDWDPKKYGGFDSPTVAYSVLVVAKVEKGKSKKLKSVKELLGITIMERSSFEKNPIDFLEAKGYKEVKKDLIIKLPKYSLFELENGRKRMLASAGELQKGNELALPSKYVNFLYLASHYEKLKGSPEDNEQKQLFVEQHKHYLDEIIEQISEFSKRVILADANLDKVLSAYNKHRDKPIREQAENIIHLFTLTNLGAPAAFKYFDTTIDRKRYTSTKEVLDATLIHQSITGLYETRIDLSQLGGDGGGSSGGSPAPGGTLNIEDEYRLHETSKEPDVPLGSTWLSDFPQAWAETGGMGLAVRQAPLIIPLKATSTPVSIKQYPMSQEARLGIKPHIQRLLDQGILVPCQSPWNTPLLPVKKPGTNDYRPVQDLREVNKRVEDIHPTVPNPYNLLSGLPPSHQWYTVLDLKDAFFCLRLHPTSQPLFAFEWRDPEMGISGQLTWTRLPQGFKNSPTLFNEALHRDLADFRIQHPDLILLQYVDDLLLAATSEQDCQRGTRALLQTLGNLGYRASAKKAQICQKQVKYLGYLLKEGQRWLTEARKETVMGQPTPKTPRQLREFLGTAGFCRLWIPGFAEMAAPLYPLTKPGTLFNWGPDQQKAYQEIKQALLTAPALGLPDLTKPFELFVDEKQGYAKGVLTQKLGPWRRPVAYLSKKLDPVAAGWPPCLRMVAAIAVLTKDAGKLTMGQPLVILAPHAVEALVKQPPDRWLSNARMTHYQAMLLDTDRVQFGPVVALNPATLLPLPEKEAPHDCLEILAETHGTRPDLTDQPIPDADYTWYTDGSSFLQEGQRRAGAAVTTETEVIWARALPAGTSAQRAELIALTQALKMAEGKKLNVYTDSRYAFATAHVHGEIYRRRGWLTSEGREIKNKNEILALLKALFLPKRLSIIHCPGHQKGNSAEARGNRMADQAAREAAMKAVLETSTLLAGKRTADGSEFEKRTADGSEFESPKKKAKVE

SEQ ID NO: 7151 - protein, 2096 aa, synthetic construct
MPAAKRVKLDGGDKKYSIGLDIGTNSVGWAVITDEYKVPSKKFKVLGNTDRHSIKKNLIGALLFDSGETAEATRLKRTARRRYTRRKNRICYLQEIFSNEMAKVDDSFFHRLEESFLVEEDKKHERHPIFGNIVDEVAYHEKYPTIYHLRKKLVDSTDKADLRLIYLALAHMIKFRGHFLIEGDLNPDNSDVDKLFIQLVQTYNQLFEENPINASGVDAKAILSARLSKSRRLENLIAQLPGEKKNGLFGNLIALSLGLTPNFKSNFDLAEDAKLQLSKDTYDDDLDNLLAQIGDQYADLFLAAKNLSDAILLSDILRVNTEITKAPLSASMIKRYDEHHQDLTLLKALVRQQLPEKYKEIFFDQSKNGYAGYIDGGASQEEFYKFIKPILEKMDGTEELLVKLNREDLLRKQRTFDNGSIPHQIHLGELHAILRRQEDFYPFLKDNREKIEKILTFRIPYYVGPLARGNSRFAWMTRKSEETITPWNFEEVVDKGASAQSFIERMTNFDKNLPNEKVLPKHSLLYEYFTVYNELTKVKYVTEGMRKPAFLSGEQKKAIVDLLFKTNRKVTVKQLKEDYFKKIECFDSVEISGVEDRFNASLGTYHDLLKIIKDKDFLDNEENEDILEDIVLTLTLFEDREMIEERLKTYAHLFDDKVMKQLKRRRYTGWGRLSRKLINGIRDKQSGKTILDFLKSDGFANRNFMQLIHDDSLTFKEDIQKAQVSGQGDSLHEHIANLAGSPAIKKGILQTVKVVDELVKVMGRHKPENIVIEMARENQTTQKGQKNSRERMKRIEEGIKELGSQILKEHPVENTQLQNEKLYLYYLQNGRDMYVDQELDINRLSDYDVDHIVPQSFLKDDSIDNKVLTRSDKARGKSDNVPSEEVVKKMKNYWRQLLNAKLITQRKFDNLTKAERGGLSELDKAGFIKRQLVETRQITKHVAQILDSRMNTKYDENDKLIREVKVITLKSKLVSDFRKDFQFYKVREINNYHHAHDAYLNAVVGTALIKKYPKLESEFVYGDYKVYDVRKMIAKSEQEIGKATAKYFFYSNIMNFFKTEITLANGEIRKRPLIETNGETGEIVWDKGRDFATVRKVLSMPQVNIVKKTEVQTGGFSKESILPKRNSDKLIARKKDWDPKKYGGFDSPTVAYSVLVVAKVEKGKSKKLKSVKELLGITIMERSSFEKNPIDFLEAKGYKEVKKDLIIKLPKYSLFELENGRKRMLASAGELQKGNELALPSKYVNFLYLASHYEKLKGSPEDNEQKQLFVEQHKHYLDEIIEQISEFSKRVILADANLDKVLSAYNKHRDKPIREQAENIIHLFTLTNLGAPAAFKYFDTTIDRKRYTSTKEVLDATLIHQSITGLYETRIDLSQLGGDGGGSSPAPGGSGGTAPLEEEYRLFLEAPIQNVTLLEQWKREIPKVWAEINPPGLASTQAPIHVQLLSTALPVRVRQYPITLEAKRSLRETIRKFRAAGILRPVHSPWNTPLLPVRKSGTSEYRMVQDLREVNKRVETIHPTVPNPYTLLSLLPPDRIWYSVLDLKDAFFCIPLAPESQLIFAFEWADAEEGESGQLTWTRLPQGFKNSPTLFNEALNRDLQGFRLDHPSVSLLQYVDDLLIAADTQAACLSATRDLLMTLAELGYRVSGKKAQLCQEEVTYLGFKIHKGSRSLSNSRTQAILQIPVPKTKRQVREFLGTIGYCRLWIPGFAELAQPLYAATRPGNDPLVWGEKEEEAFQSLKLALTQPPALALPSLDKPFQLFVEETSGAAKGVLTQALGPWKRPVAYLSKRLDPVAAGWPRCLRAIAAAALLTREASKLTFGQDIEITSSHNLESLLRSPPDKWLTNARITQYQVLLLDPPRVRFKQTAALNPATLLPETDDTLPIHHCLDTLDSLTSTRPDLTDQPLAQAEATLFTDGSSYIRDGKRYAGAAVVTLDSVIWAEPLPIGTSAQKAELIALTKALEWSKDKSVNIYTDSRYAFATLHVHGMIYRERGWLTAGGKAIKNAPEILALLTAVWLPKRVAVMHCKGHQKDDAPTSTGNRRADEVAREVAIRPLSTQATISAGKRTADGSEFEKRTADGSEFESPKKKAKVE

SEQ ID NO: 7152 - protein, 2096 aa, synthetic construct
MPAAKRVKLDGGDKKYSIGLDIGTNSVGWAVITDEYKVPSKKFKVLGNTDRHSIKKNLIGALLFDSGETAEATRLKRTARRRYTRRKNRICYLQEIFSNEMAKVDDSFFHRLEESFLVEEDKKHERHPIFGNIVDEVAYHEKYPTIYHLRKKLVDSTDKADLRLIYLALAHMIKFRGHFLIEGDLNPDNSDVDKLFIQLVQTYNQLFEENPINASGVDAKAILSARLSKSRRLENLIAQLPGEKKNGLFGNLIALSLGLTPNFKSNFDLAEDAKLQLSKDTYDDDLDNLLAQIGDQYADLFLAAKNLSDAILLSDILRVNTEITKAPLSASMIKRYDEHHQDLTLLKALVRQQLPEKYKEIFFDQSKNGYAGYIDGGASQEEFYKFIKPILEKMDGTEELLVKLNREDLLRKQRTFDNGSIPHQIHLGELHAILRRQEDFYPFLKDNREKIEKILTFRIPYYVGPLARGNSRFAWMTRKSEETITPWNFEEVVDKGASAQSFIERMTNFDKNLPNEKVLPKHSLLYEYFTVYNELTKVKYVTEGMRKPAFLSGEQKKAIVDLLFKTNRKVTVKQLKEDYFKKIECFDSVEISGVEDRFNASLGTYHDLLKIIKDKDFLDNEENEDILEDIVLTLTLFEDREMIEERLKTYAHLFDDKVMKQLKRRRYTGWGRLSRKLINGIRDKQSGKTILDFLKSDGFANRNFMQLIHDDSLTFKEDIQKAQVSGQGDSLHEHIANLAGSPAIKKGILQTVKVVDELVKVMGRHKPENIVIEMARENQTTQKGQKNSRERMKRIEEGIKELGSQILKEHPVENTQLQNEKLYLYYLQNGRDMYVDQELDINRLSDYDVDHIVPQSFLKDDSIDNKVLTRSDKARGKSDNVPSEEVVKKMKNYWRQLLNAKLITQRKFDNLTKAERGGLSELDKAGFIKRQLVETRQITKHVAQILDSRMNTKYDENDKLIREVKVITLKSKLVSDFRKDFQFYKVREINNYHHAHDAYLNAVVGTALIKKYPKLESEFVYGDYKVYDVRKMIAKSEQEIGKATAKYFFYSNIMNFFKTEITLANGEIRKRPLIETNGETGEIVWDKGRDFATVRKVLSMPQVNIVKKTEVQTGGFSKESILPKRNSDKLIARKKDWDPKKYGGFDSPTVAYSVLVVAKVEKGKSKKLKSVKELLGITIMERSSFEKNPIDFLEAKGYKEVKKDLIIKLPKYSLFELENGRKRMLASAGELQKGNELALPSKYVNFLYLASHYEKLKGSPEDNEQKQLFVEQHKHYLDEIIEQISEFSKRVILADANLDKVLSAYNKHRDKPIREQAENIIHLFTLTNLGAPAAFKYFDTTIDRKRYTSTKEVLDATLIHQSITGLYETRIDLSQLGGDGGGSSPAPGGSGGTAPLEEEYRLFLEAPIQNVTLLEQWKREIPKVWAEINPPGLASTQAPIHVQLLSTALPVRVRQYPITLEAKRSLRETIRKFRAAGILRPVHSPWNTPLLPVRKSGTSEYRMVQDLREVNKRVETIHPTVPNPYTLLSLLPPDRIWYSVLDLKDAFFCIPLAPESQLIFAFEWADAEEGESGQLTWTRLPQGFKNSPTLFNEALNRDLQGFRLDHPSVSLLQYVDDLLIAADTQAACLSATRDLLMTLAELGYRVSGKKAQLCQEEVTYLGFKIHKGSRSLSNSRTQAILQIPVPKTKRQVREFLGKIGYCRLFIPGFAELAQPLYAATRPGNDPLVWGEKEEEAFQSLKLALTQPPALALPSLDKPFQLFVEETSGAAKGVLTQALGPWKRPVAYLSKRLDPVAAGWPRCLRAIAAAALLTREASKLTFGQDIEITSSHNLESLLRSPPDKWLTNARITQYQVLLLDPPRVRFKQTAALNPATLLPETDDTLPIHHCLDTLDSLTSTRPDLTDQPLAQAEATLFTDGSSYIRDGKRYAGAAVVTLDSVIWAEPLPIGTSAQKAELIALTKALEWSKDKSVNIYTDSRYAFATLHVHGMIYRERGWLTAGGKAIKNAPEILALLTAVWLPKRVAVMHCKGHQKDDAPTSTGNRRADEVAREVAIRPLSTQATISAGKRTADGSEFEKRTADGSEFESPKKKAKVE

SEQ ID NO: 7153 - protein, 2093 aa, synthetic construct
MPAAKRVKLDGGDKKYSIGLDIGTNSVGWAVITDEYKVPSKKFKVLGNTDRHSIKKNLIGALLFDSGETAEATRLKRTARRRYTRRKNRICYLQEIFSNEMAKVDDSFFHRLEESFLVEEDKKHERHPIFGNIVDEVAYHEKYPTIYHLRKKLVDSTDKADLRLIYLALAHMIKFRGHFLIEGDLNPDNSDVDKLFIQLVQTYNQLFEENPINASGVDAKAILSARLSKSRRLENLIAQLPGEKKNGLFGNLIALSLGLTPNFKSNFDLAEDAKLQLSKDTYDDDLDNLLAQIGDQYADLFLAAKNLSDAILLSDILRVNTEITKAPLSASMIKRYDEHHQDLTLLKALVRQQLPEKYKEIFFDQSKNGYAGYIDGGASQEEFYKFIKPILEKMDGTEELLVKLNREDLLRKQRTFDNGSIPHQIHLGELHAILRRQEDFYPFLKDNREKIEKILTFRIPYYVGPLARGNSRFAWMTRKSEETITPWNFEEVVDKGASAQSFIERMTNFDKNLPNEKVLPKHSLLYEYFTVYNELTKVKYVTEGMRKPAFLSGEQKKAIVDLLFKTNRKVTVKQLKEDYFKKIECFDSVEISGVEDRFNASLGTYHDLLKIIKDKDFLDNEENEDILEDIVLTLTLFEDREMIEERLKTYAHLFDDKVMKQLKRRRYTGWGRLSRKLINGIRDKQSGKTILDFLKSDGFANRNFMQLIHDDSLTFKEDIQKAQVSGQGDSLHEHIANLAGSPAIKKGILQTVKVVDELVKVMGRHKPENIVIEMARENQTTQKGQKNSRERMKRIEEGIKELGSQILKEHPVENTQLQNEKLYLYYLQNGRDMYVDQELDINRLSDYDVDHIVPQSFLKDDSIDNKVLTRSDKARGKSDNVPSEEVVKKMKNYWRQLLNAKLITQRKFDNLTKAERGGLSELDKAGFIKRQLVETRQITKHVAQILDSRMNTKYDENDKLIREVKVITLKSKLVSDFRKDFQFYKVREINNYHHAHDAYLNAVVGTALIKKYPKLESEFVYGDYKVYDVRKMIAKSEQEIGKATAKYFFYSNIMNFFKTEITLANGEIRKRPLIETNGETGEIVWDKGRDFATVRKVLSMPQVNIVKKTEVQTGGFSKESILPKRNSDKLIARKKDWDPKKYGGFDSPTVAYSVLVVAKVEKGKSKKLKSVKELLGITIMERSSFEKNPIDFLEAKGYKEVKKDLIIKLPKYSLFELENGRKRMLASAGELQKGNELALPSKYVNFLYLASHYEKLKGSPEDNEQKQLFVEQHKHYLDEIIEQISEFSKRVILADANLDKVLSAYNKHRDKPIREQAENIIHLFTLTNLGAPAAFKYFDTTIDRKRYTSTKEVLDATLIHQSITGLYETRIDLSQLGGDGGGSSPAPGGSGGTLQLEEEYRLFEPESTQKQEMDIWLKNFPQAWAETGGMGTAHCQAPVLIQLKATATPISIRQYPMPHEAYQGIKPHIRRMLDQGILKPCQSPWNTPLLPVKKPGTEDYRPVQDLREVNKRVEDIHPTVPNPYNLLSTLPPSHPWYTVLDLKDAFFCLRLHSESQLLFAFEWRDPEIGLSGQLTWTRLPQGFKNSPTLFNEALHSDLADFRVRYPALVLLQYVDDLLLAAATRTECLEGTKALLETLGNKGYRASAKKAQICLQEVTYLGYSLKDGQRWLTKARKEAILSIPVPKNSRQVREFLGKAGYCRLFIPGFAELAAPLYPLTRPGTLFQWGTEQQLAFEDIKKALLSSPALGLPDITKPFELFIDENSGFAKGVLVQKLGPWKRPVAYLSKKLDTVASGWPPCLRMVAAIAILVKDAGKLTLGQPLTILTSHPVEALVRQPPNKWLSNARMTHYQAMLLDAERVHFGPTVSLNPATLLPLPSGGNHHDCLQILAETHGTRPDLTDQPLPDADLTWYTDGSSFIRNGEREAGAAVTTESEVIWAAPLPPGTSAQRAELIALTQALKMAEGKKLTVYTDSRYAFATTHVHGEIYRRRGWLTSEGKEIKNKNEILALLEALFLPKRLSIIHCPGHQKGDSPQAKGNRLADDTAKKAATETHSSLTVLPAGKRTADGSEFEKRTADGSEFESPKKKAKVE

SEQ ID NO: 7154 - protein, 2125 aa, synthetic construct; identical to SEQ ID NO: 4526

SEQ ID NO: 7155 - protein, 2216 aa, synthetic construct
MPAAKRVKLDGGDKKYSIGLDIGTNSVGWAVITDEYKVPSKKFKVLGNTDRHSIKKNLIGALLFDSGETAEATRLKRTARRRYTRRKNRICYLQEIFSNEMAKVDDSFFHRLEESFLVEEDKKHERHPIFGNIVDEVAYHEKYPTIYHLRKKLVDSTDKADLRLIYLALAHMIKFRGHFLIEGDLNPDNSDVDKLFIQLVQTYNQLFEENPINASGVDAKAILSARLSKSRRLENLIAQLPGEKKNGLFGNLIALSLGLTPNFKSNFDLAEDAKLQLSKDTYDDDLDNLLAQIGDQYADLFLAAKNLSDAILLSDILRVNTEITKAPLSASMIKRYDEHHQDLTLLKALVRQQLPEKYKEIFFDQSKNGYAGYIDGGASQEEFYKFIKPILEKMDGTEELLVKLNREDLLRKQRTFDNGSIPHQIHLGELHAILRRQEDFYPFLKDNREKIEKILTFRIPYYVGPLARGNSRFAWMTRKSEETITPWNFEEVVDKGASAQSFIERMTNFDKNLPNEKVLPKHSLLYEYFTVYNELTKVKYVTEGMRKPAFLSGEQKKAIVDLLFKTNRKVTVKQLKEDYFKKIECFDSVEISGVEDRFNASLGTYHDLLKIIKDKDFLDNEENEDILEDIVLTLTLFEDREMIEERLKTYAHLFDDKVMKQLKRRRYTGWGRLSRKLINGIRDKQSGKTILDFLKSDGFANRNFMQLIHDDSLTFKEDIQKAQVSGQGDSLHEHIANLAGSPAIKKGILQTVKVVDELVKVMGRHKPENIVIEMARENQTTQKGQKNSRERMKRIEEGIKELGSQILKEHPVENTQLQNEKLYLYYLQNGRDMYVDQELDINRLSDYDVDHIVPQSFLKDDSIDNKVLTRSDKARGKSDNVPSEEVVKKMKNYWRQLLNAKLITQRKFDNLTKAERGGLSELDKAGFIKRQLVETRQITKHVAQILDSRMNTKYDENDKLIREVKVITLKSKLVSDFRKDFQFYKVREINNYHHAHDAYLNAVVGTALIKKYPKLESEFVYGDYKVYDVRKMIAKSEQEIGKATAKYFFYSNIMNFFKTEITLANGEIRKRPLIETNGETGEIVWDKGRDFATVRKVLSMPQVNIVKKTEVQTGGFSKESILPKRNSDKLIARKKDWDPKKYGGFDSPTVAYSVLVVAKVEKGKSKKLKSVKELLGITIMERSSFEKNPIDFLEAKGYKEVKKDLIIKLPKYSLFELENGRKRMLASAGELQKGNELALPSKYVNFLYLASHYEKLKGSPEDNEQKQLFVEQHKHYLDEIIEQISEFSKRVILADANLDKVLSAYNKHRDKPIREQAENIIHLFTLTNLGAPAAFKYFDTTIDRKRYTSTKEVLDATLIHQSITGLYETRIDLSQLGGDGGGSSPAPGGSGGTLGDQGSRGSDPLPEPRVTLTVEGIPTEFLVNTGAEHSVLTKPMGKMGSKRTVVAGATGSKVYPWTTKRLLKIGQKQVTHSFLVIPECPAPLLGRDLLTKLKAQIQFSTEGPQVTWEDRPAMCLVLNLEEEYRLHEKPVPPSIDPSWLQLFPMVWAEKAGMGLANQVPPVVVELKSDASPVAVRQYPMSKEAREGIRPHIQRFLDLGILVPCQSPWNTPLLPVKKPGTNDYRPVQDLREVNKRVQDIHPTVPNPYNLLSSLPPSHTWYSVLDLKDAFFCLKLHPNSQPLFAFEWRDPEKGNTGQLTWTRLPQGFKNSPTLFNEALHRDLASFRALNPQVVMLQYVDDLLVAAPTYRDCKEGTRRLLQELSKLGYRVSAKKAQLCREEVTYLGYLLKGGKRWLTPARKATVMKIPTPTTPRQVREFLGTAGFCRLWIPGFASLAAPLYPLTRPKVPFTWTEAHQEAFGRIKEALLSAPALALPDLTKPFALYVDEKEGVARGVLTQTLGPWRRPVAYLSKKLDPVASGWPTCLKAIAAVALLLKDADKLTLGQNVLVIAPHNLESIVRQPPDRWMTNARMTHYQSLLLNERVSFAPPAILNPATLLPVESDDTPIHICSEILAEETGTRPDLRDQPLPGVPAWYTDGSSFIMDGRRQAGAAIVDNKRTVWASNLPEGTSAQKAELIALTQALRLAEGKSINIYTDSRYAFATAHVHGAIYKQRGWLTSAGKDIKNKEEILALLEAIHLPKRVAIIHCPGHQRGTDPVATGNRKADEAAKQAAQSTRILTETTKNAGKRTADGSEFEKRTADGSEFESPKKKAKVE

SEQ ID NO: 7156 - protein, 2094 aa, synthetic construct
MPAAKRVKLDGGDKKYSIGLDIGTNSVGWAVITDEYKVPSKKFKVLGNTDRHSIKKNLIGALLFDSGETAEATRLKRTARRRYTRRKNRICYLQEIFSNEMAKVDDSFFHRLEESFLVEEDKKHERHPIFGNIVDEVAYHEKYPTIYHLRKKLVDSTDKADLRLIYLALAHMIKFRGHFLIEGDLNPDNSDVDKLFIQLVQTYNQLFEENPINASGVDAKAILSARLSKSRRLENLIAQLPGEKKNGLFGNLIALSLGLTPNFKSNFDLAEDAKLQLSKDTYDDDLDNLLAQIGDQYADLFLAAKNLSDAILLSDILRVNTEITKAPLSASMIKRYDEHHQDLTLLKALVRQQLPEKYKEIFFDQSKNGYAGYIDGGASQEEFYKFIKPILEKMDGTEELLVKLNREDLLRKQRTFDNGSIPHQIHLGELHAILRRQEDFYPFLKDNREKIEKILTFRIPYYVGPLARGNSRFAWMTRKSEETITPWNFEEVVDKGASAQSFIERMTNFDKNLPNEKVLPKHSLLYEYFTVYNELTKVKYVTEGMRKPAFLSGEQKKAIVDLLFKTNRKVTVKQLKEDYFKKIECFDSVEISGVEDRFNASLGTYHDLLKIIKDKDFLDNEENEDILEDIVLTLTLFEDREMIEERLKTYAHLFDDKVMKQLKRRRYTGWGRLSRKLINGIRDKQSGKTILDFLKSDGFANRNFMQLIHDDSLTFKEDIQKAQVSGQGDSLHEHIANLAGSPAIKKGILQTVKVVDELVKVMGRHKPENIVIEMARENQTTQKGQKNSRERMKRIEEGIKELGSQILKEHPVENTQLQNEKLYLYYLQNGRDMYVDQELDINRLSDYDVDHIVPQSFLKDDSIDNKVLTRSDKARGKSDNVPSEEVVKKMKNYWRQLLNAKLITQRKFDNLTKAERGGLSELDKAGFIKRQLVETRQITKHVAQILDSRMNTKYDENDKLIREVKVITLKSKLVSDFRKDFQFYKVREINNYHHAHDAYLNAVVGTALIKKYPKLESEFVYGDYKVYDVRKMIAKSEQEIGKATAKYFFYSNIMNFFKTEITLANGEIRKRPLIETNGETGEIVWDKGRDFATVRKVLSMPQVNIVKKTEVQTGGFSKESILPKRNSDKLIARKKDWDPKKYGGFDSPTVAYSVLVVAKVEKGKSKKLKSVKELLGITIMERSSFEKNPIDFLEAKGYKEVKKDLIIKLPKYSLFELENGRKRMLASAGELQKGNELALPSKYVNFLYLASHYEKLKGSPEDNEQKQLFVEQHKHYLDEIIEQISEFSKRVILADANLDKVLSAYNKHRDKPIREQAENIIHLFTLTNLGAPAAFKYFDTTIDRKRYTSTKEVLDATLIHQSITGLYETRIDLSQLGGDGGGSSPAPGGSGGTLNLEDEYRLYETSAEPEVSPGSTWLSDFPQAWAETGGMGLAVRQAPLIIPLKATSTPVSIKQYPMSQEAKLGIKPHIQRLLDQGILVPCQSPWNTPLLPVKKPGTNDYRPVQDLREVNKRVEDIHPTVPNPYNLLSGLPPSHRWYTVLDLKDAFFCLRLHPTSQPLFAFEWRDPGMGISGQLTWTRLPQGFKNSPTLFNEALHRDLADFRIQHPDLILLQYVDDILLAATSELDCQQGTRALLLTLGNLGYRASAKKAQLCQKQVKYLGYLLKEGQRWLTEARKETVMGQPTPKTPRQLREFLGKAGFCRLFIPGFAEMAAPLYPLTKPGTLFNWGPDQQKAYQEIKQALLTAPALGLPDLTKPFELFVDEKQGYAKGVLTQKLGPWRRPVAYLSKKLDPVAAGWPPCLRMVAAIAVLRKDAGKLTMGQPLVILAPHAVEALVKQPPDRWLSNARMTHYQAMLLDTDRVQFGPVVALNPATLLPLPEEGAPHDCLEILAETHGTRPDLTDQPIPDADHTWYTDGSSFLQEGQRKAGAAVTTETEVIWARALPAGTSAQRAELIALTQALKMAEGKRLNVYTDSRYAFATAHIHGEIYRRRGWLTSEGREIKNKSEILALLKALFLPKRLSIIHCLGHQKGDSAEARGNRLADQAAREAAIKTPPDTSTLLAGKRTADGSEFEKRTADGSEFESPKKKAKVE

SEQ ID NO: 7157 - protein, 2094 aa, synthetic construct
MPAAKRVKLDGGDKKYSIGLDIGTNSVGWAVITDEYKVPSKKFKVLGNTDRHSIKKNLIGALLFDSGETAEATRLKRTARRRYTRRKNRICYLQEIFSNEMAKVDDSFFHRLEESFLVEEDKKHERHPIFGNIVDEVAYHEKYPTIYHLRKKLVDSTDKADLRLIYLALAHMIKFRGHFLIEGDLNPDNSDVDKLFIQLVQTYNQLFEENPINASGVDAKAILSARLSKSRRLENLIAQLPGEKKNGLFGNLIALSLGLTPNFKSNFDLAEDAKLQLSKDTYDDDLDNLLAQIGDQYADLFLAAKNLSDAILLSDILRVNTEITKAPLSASMIKRYDEHHQDLTLLKALVRQQLPEKYKEIFFDQSKNGYAGYIDGGASQEEFYKFIKPILEKMDGTEELLVKLNREDLLRKQRTFDNGSIPHQIHLGELHAILRRQEDFYPFLKDNREKIEKILTFRIPYYVGPLARGNSRFAWMTRKSEETITPWNFEEVVDKGASAQSFIERMTNFDKNLPNEKVLPKHSLLYEYFTVYNELTKVKYVTEGMRKPAFLSGEQKKAIVDLLFKTNRKVTVKQLKEDYFKKIECFDSVEISGVEDRFNASLGTYHDLLKIIKDKDFLDNEENEDILEDIVLTLTLFEDREMIEERLKTYAHLFDDKVMKQLKRRRYTGWGRLSRKLINGIRDKQSGKTILDFLKSDGFANRNFMQLIHDDSLTFKEDIQKAQVSGQGDSLHEHIANLAGSPAIKKGILQTVKVVDELVKVMGRHKPENIVIEMARENQTTQKGQKNSRERMKRIEEGIKELGSQILKEHPVENTQLQNEKLYLYYLQNGRDMYVDQELDINRLSDYDVDHIVPQSFLKDDSIDNKVLTRSDKARGKSDNVPSEEVVKKMKNYWRQLLNAKLITQRKFDNLTKAERGGLSELDKAGFIKRQLVETRQITKHVAQILDSRMNTKYDENDKLIREVKVITLKSKLVSDFRKDFQFYKVREINNYHHAHDAYLNAVVGTALIKKYPKLESEFVYGDYKVYDVRKMIAKSEQEIGKATAKYFFYSNIMNFFKTEITLANGEIRKRPLIETNGETGEIVWDKGRDFATVRKVLSMPQVNIVKKTEVQTGGFSKESILPKRNSDKLIARKKDWDPKKYGGFDSPTVAYSVLVVAKVEKGKSKKLKSVKELLGITIMERSSFEKNPIDFLEAKGYKEVKKDLIIKLPKYSLFELENGRKRMLASAGELQKGNELALPSKYVNFLYLASHYEKLKGSPEDNEQKQLFVEQHKHYLDEIIEQISEFSKRVILADANLDKVLSAYNKHRDKPIREQAENIIHLFTLTNLGAPAAFKYFDTTIDRKRYTSTKEVLDATLIHQSITGLYETRIDLSQLGGDGGGSSPAPGGSGGTLNIEDEHRLHETSKEPDVSLGSTWLSDFPQAWAETGGMGLAVRQAPLIIPLKATSTPVSIKQYPMSQEARLGIKPHIQRLLDQGILVPCQSPWNTPLLPVKKPGTNDYRPVQDLREVNKRVEDIHPTVPNPYNLLSGLPPSHQWYTVLDLKDAFFCLRLHPTSQPLFAFEWRDPEMGISGQLTWTRLPQGFKNSPTLFNEALHRDLADFRIQHPDLILLQYVDDLLLAATSELDCQQGTRALLQTLGNLGYRASAKKAQICQKQVKYLGYLLKEGQRWLTEARKETVMGQPTPKTPRQLREFLGTAGFCRLWIPGFAEMAAPLYPLTKPGTLFNWGPDQQKAYQEIKQALLTAPALGLPDLTKPFELFVDEKQGYAKGVLTQKLGPWRRPVAYLSKKLDPVAAGWPPCLRMVAAIAVLTKDAGKLTMGQPLVILAPHAVEALVKQPPDRWLSNARMTHYQALLLDTDRVQFGPVVALNPATLLPLPEEGLQHNCLDILAEAHGTRPDLTDQPLPDADHTWYTDGSSLLQEGQRKAGAAVTTETEVIWAKALPAGTSAQRAELIALTQALKMAEGKKLNVYTDSRYAFATAHIHGEIYRRRGWLTSEGKEIKNKDEILALLKALFLPKRLSIIHCPGHQKGHSAEARGNRMADQAARKAAITETPDTSTLLAGKRTADGSEFEKRTADGSEFESPKKKAKVE

SEQ ID NO: 7158 - protein, 2094 aa, synthetic construct
MPAAKRVKLDGGDKKYSIGLDIGTNSVGWAVITDEYKVPSKKFKVLGNTDRHSIKKNLIGALLFDSGETAEATRLKRTARRRYTRRKNRICYLQEIFSNEMAKVDDSFFHRLEESFLVEEDKKHERHPIFGNIVDEVAYHEKYPTIYHLRKKLVDSTDKADLRLIYLALAHMIKFRGHFLIEGDLNPDNSDVDKLFIQLVQTYNQLFEENPINASGVDAKAILSARLSKSRRLENLIAQLPGEKKNGLFGNLIALSLGLTPNFKSNFDLAEDAKLQLSKDTYDDDLDNLLAQIGDQYADLFLAAKNLSDAILLSDILRVNTEITKAPLSASMIKRYDEHHQDLTLLKALVRQQLPEKYKEIFFDQSKNGYAGYIDGGASQEEFYKFIKPILEKMDGTEELLVKLNREDLLRKQRTFDNGSIPHQIHLGELHAILRRQEDFYPFLKDNREKIEKILTFRIPYYVGPLARGNSRFAWMTRKSEETITPWNFEEVVDKGASAQSFIERMTNFDKNLPNEKVLPKHSLLYEYFTVYNELTKVKYVTEGMRKPAFLSGEQKKAIVDLLFKTNRKVTVKQLKEDYFKKIECFDSVEISGVEDRFNASLGTYHDLLKIIKDKDFLDNEENEDILEDIVLTLTLFEDREMIEERLKTYAHLFDDKVMKQLKRRRYTGWGRLSRKLINGIRDKQSGKTILDFLKSDGFANRNFMQLIHDDSLTFKEDIQKAQVSGQGDSLHEHIANLAGSPAIKKGILQTVKVVDELVKVMGRHKPENIVIEMARENQTTQKGQKNSRERMKRIEEGIKELGSQILKEHPVENTQLQNEKLYLYYLQNGRDMYVDQELDINRLSDYDVDHIVPQSFLKDDSIDNKVLTRSDKARGKSDNVPSEEVVKKMKNYWRQLLNAKLITQRKFDNLTKAERGGLSELDKAGFIKRQLVETRQITKHVAQILDSRMNTKYDENDKLIREVKVITLKSKLVSDFRKDFQFYKVREINNYHHAHDAYLNAVVGTALIKKYPKLESEFVYGDYKVYDVRKMIAKSEQEIGKATAKYFFYSNIMNFFKTEITLANGEIRKRPLIETNGETGEIVWDKGRDFATVRKVLSMPQVNIVKKTEVQTGGFSKESILPKRNSDKLIARKKDWDPKKYGGFDSPTVAYSVLVVAKVEKGKSKKLKSVKELLGITIMERSSFEKNPIDFLEAKGYKEVKKDLIIKLPKYSLFELENGRKRMLASAGELQKGNELALPSKYVNFLYLASHYEKLKGSPEDNEQKQLFVEQHKHYLDEIIEQISEFSKRVILADANLDKVLSAYNKHRDKPIREQAENIIHLFTLTNLGAPAAFKYFDTTIDRKRYTSTKEVLDATLIHQSITGLYETRIDLSQLGGDGGGSSPAPGGSGGTLNIEDEHRLHETSKEPDVSLGSTWLSDFPQAWAETGGMGLAVRQAPLIIPLKATSTPVSIKQYPMSQEARLGIKPHIQRLLDQGILVPCQSPWNTPLLPVKKPGTNDYRPVQDLREVNKRVEDIHPTVPNPYNLLSGLPPSHQWYTVLDLKDAFFCLRLHPTSQPLFAFEWRDPEMGISGQLTWTRLPQGFKNSPTLFNEALHRDLADFRIQHPDLILLQYVDDLLLAATSELDCQQGTRALLQTLGNLGYRASAKKAQICQKQVKYLGYLLKEGQRWLTEARKETVMGQPTPKTPRQLREFLGKAGFCRLFIPGFAEMAAPLYPLTKPGTLFNWGPDQQKAYQEIKQALLTAPALGLPDLTKPFELFVDEKQGYAKGVLTQKLGPWRRPVAYLSKKLDPVAAGWPPCLRMVAAIAVLTKDAGKLTMGQPLVILAPHAVEALVKQPPDRWLSNARMTHYQALLLDTDRVQFGPVVALNPATLLPLPEEGLQHNCLDILAEAHGTRPDLTDQPLPDADHTWYTDGSSLLQEGQRKAGAAVTTETEVIWAKALPAGTSAQRAELIALTQALKMAEGKKLNVYTDSRYAFATAHIHGEIYRRRGWLTSEGKEIKNKDEILALLKALFLPKRLSIIHCPGHQKGHSAEARGNRMADQAARKAAITETPDTSTLLAGKRTADGSEFEKRTADGSEFESPKKKAKVE

SEQ ID NO: 7159 - protein, 2094 aa, synthetic construct; identical to SEQ ID NO: 7157

SEQ ID NO: 7160 - protein, 2094 aa, synthetic construct; identical to SEQ ID NO: 7158

SEQ ID NO: 7161 - protein, 2085 aa, synthetic construct
MPAAKRVKLDGGDKKYSIGLDIGTNSVGWAVITDEYKVPSKKFKVLGNTDRHSIKKNLIGALLFDSGETAEATRLKRTARRRYTRRKNRICYLQEIFSNEMAKVDDSFFHRLEESFLVEEDKKHERHPIFGNIVDEVAYHEKYPTIYHLRKKLVDSTDKADLRLIYLALAHMIKFRGHFLIEGDLNPDNSDVDKLFIQLVQTYNQLFEENPINASGVDAKAILSARLSKSRRLENLIAQLPGEKKNGLFGNLIALSLGLTPNFKSNFDLAEDAKLQLSKDTYDDDLDNLLAQIGDQYADLFLAAKNLSDAILLSDILRVNTEITKAPLSASMIKRYDEHHQDLTLLKALVRQQLPEKYKEIFFDQSKNGYAGYIDGGASQEEFYKFIKPILEKMDGTEELLVKLNREDLLRKQRTFDNGSIPHQIHLGELHAILRRQEDFYPFLKDNREKIEKILTFRIPYYVGPLARGNSRFAWMTRKSEETITPWNFEEVVDKGASAQSFIERMTNFDKNLPNEKVLPKHSLLYEYFTVYNELTKVKYVTEGMRKPAFLSGEQKKAIVDLLFKTNRKVTVKQLKEDYFKKIECFDSVEISGVEDRFNASLGTYHDLLKIIKDKDFLDNEENEDILEDIVLTLTLFEDREMIEERLKTYAHLFDDKVMKQLKRRRYTGWGRLSRKLINGIRDKQSGKTILDFLKSDGFANRNFMQLIHDDSLTFKEDIQKAQVSGQGDSLHEHIANLAGSPAIKKGILQTVKVVDELVKVMGRHKPENIVIEMARENQTTQKGQKNSRERMKRIEEGIKELGSQILKEHPVENTQLQNEKLYLYYLQNGRDMYVDQELDINRLSDYDVDHIVPQSFLKDDSIDNKVLTRSDKARGKSDNVPSEEVVKKMKNYWRQLLNAKLITQRKFDNLTKAERGGLSELDKAGFIKRQLVETRQITKHVAQILDSRMNTKYDENDKLIREVKVITLKSKLVSDFRKDFQFYKVREINNYHHAHDAYLNAVVGTALIKKYPKLESEFVYGDYKVYDVRKMIAKSEQEIGKATAKYFFYSNIMNFFKTEITLANGEIRKRPLIETNGETGEIVWDKGRDFATVRKVLSMPQVNIVKKTEVQTGGFSKESILPKRNSDKLIARKKDWDPKKYGGFDSPTVAYSVLVVAKVEKGKSKKLKSVKELLGITIMERSSFEKNPIDFLEAKGYKEVKKDLIIKLPKYSLFELENGRKRMLASAGELQKGNELALPSKYVNFLYLASHYEKLKGSPEDNEQKQLFVEQHKHYLDEIIEQISEFSKRVILADANLDKVLSAYNKHRDKPIREQAENIIHLFTLTNLGAPAAFKYFDTTIDRKRYTSTKEVLDATLIHQSITGLYETRIDLSQLGGDGGGSSPAPGGSGGIPWLMKKPLQLTTLVPLQEYEERLLKQTMLTGSYKEKLQSLFLKYDALWQHWENQVGHRRIKPHHIATGTVNPRPQKQYPINPKAKASIQTVINDLLKQGVLIQQNSIMNTPVYPVPKPDGKWRMVLDYREVNKTIPLIAAQNQHSAGILSSIFRGKYKTTLDLSNGFWAHSITPESYWLTAFTWLGQQYCWTRLPQGFLNSPALFNADVVDLLKEVPNVQVYVDDIYISHDDPREHLEQLEKVFSLLLNAGYVVSLKKSEIAQHEVEFLGFNITKEGRGLTETFKQKLLNITPPRDLKQLQSILGKLNFARNFIPNFSELVKPLYNIIATAPGKYITWTTDNSQQLQNIISMLNSAENLEERNPEVRLIMKVNTSPSAGYIRFYNEFAKRPIMYLNYVYTKAEVKFTNTEKLLTTIHKGLIKALDLGMGQEILVYSPIVSMTKIQKTPLPERKALPIRWITWMSYLEDPRIQFHYDKTLPELQQVPTVTDDIIAKIKHPSEFSMVFYTDGSAIKHPNVNKSHNAGMGIAQVQFKPEFTVINTWSIPLGDHTAQLAEVAAVEFACKKALKIDGPVLIVTDSFYVAESVNKELPYWQSNGFFNNKKKPLKHVSKWKSIADCIQLKPDIIIIHEKGHQPTASTFHTEGNNLADKLATQGSYVVNAGKRTADGSEFEKRTADGSEFESPKKKAKVE

SEQ ID NO: 7162 - protein, 2092 aa, synthetic construct
MPAAKRVKLDGGDKKYSIGLDIGTNSVGWAVITDEYKVPSKKFKVLGNTDRHSIKKNLIGALLFDSGETAEATRLKRTARRRYTRRKNRICYLQEIFSNEMAKVDDSFFHRLEESFLVEEDKKHERHPIFGNIVDEVAYHEKYPTIYHLRKKLVDSTDKADLRLIYLALAHMIKFRGHFLIEGDLNPDNSDVDKLFIQLVQTYNQLFEENPINASGVDAKAILSARLSKSRRLENLIAQLPGEKKNGLFGNLIALSLGLTPNFKSNFDLAEDAKLQLSKDTYDDDLDNLLAQIGDQYADLFLAAKNLSDAILLSDILRVNTEITKAPLSASMIKRYDEHHQDLTLLKALVRQQLPEKYKEIFFDQSKNGYAGYIDGGASQEEFYKFIKPILEKMDGTEELLVKLNREDLLRKQRTFDNGSIPHQIHLGELHAILRRQEDFYPFLKDNREKIEKILTFRIPYYVGPLARGNSRFAWMTRKSEETITPWNFEEVVDKGASAQSFIERMTNFDKNLPNEKVLPKHSLLYEYFTVYNELTKVKYVTEGMRKPAFLSGEQKKAIVDLLFKTNRKVTVKQLKEDYFKKIECFDSVEISGVEDRFNASLGTYHDLLKIIKDKDFLDNEENEDILEDIVLTLTLFEDREMIEERLKTYAHLFDDKVMKQLKRRRYTGWGRLSRKLINGIRDKQSGKTILDFLKSDGFANRNFMQLIHDDSLTFKEDIQKAQVSGQGDSLHEHIANLAGSPAIKKGILQTVKVVDELVKVMGRHKPENIVIEMARENQTTQKGQKNSRERMKRIEEGIKELGSQILKEHPVENTQLQNEKLYLYYLQNGRDMYVDQELDINRLSDYDVDHIVPQSFLKDDSIDNKVLTRSDKARGKSDNVPSEEVVKKMKNYWRQLLNAKLITQRKFDNLTKAERGGLSELDKAGFIKRQLVETRQITKHVAQILDSRMNTKYDENDKLIREVKVITLKSKLVSDFRKDFQFYKVREINNYHHAHDAYLNAVVGTALIKKYPKLESEFVYGDYKVYDVRKMIAKSEQEIGKATAKYFFYSNIMNFFKTEITLANGEIRKRPLIETNGETGEIVWDKGRDFATVRKVLSMPQVNIVKKTEVQTGGFSKESILPKRNSDKLIARKKDWDPKKYGGFDSPTVAYSVLVVAKVEKGKSKKLKSVKELLGITIMERSSFEKNPIDFLEAKGYKEVKKDLIIKLPKYSLFELENGRKRMLASAGELQKGNELALPSKYVNFLYLASHYEKLKGSPEDNEQKQLFVEQHKHYLDEIIEQISEFSKRVILADANLDKVLSAYNKHRDKPIREQAENIIHLFTLTNLGAPAAFKYFDTTIDRKRYTSTKEVLDATLIHQSITGLYETRIDLSQLGGDGGGSSPAPGGSGGVLNLEEEYRLHEKPVPSSIDPSWLQLFPTVWAERAGMGLANQVPPVVVELRSGASPVAVRQYPMSKEAREGIRPHIQRFLDLGVLVPCQSPWNTPLLPVKKPGTNDYRPVQDLREINKRVQDIHPTVPNPYNLLSSLPPSHTWYSVLDLKDAFFCLKLHPNSQPLFAFEWRDPEKGNTGQLTWTRLPQGFKNSPTLFNEALHRDLAPFRALNPQVVLLQYVDDLLVAAPTYRDCKEGTQKLLQELSKLGYRVSAKKAQLCQKEVTYLGYLLKEGKRWLTPARKATVMKIPPPTTPRQVREFLGKAGFCRLFIPGFASLAAPLYPLTKPSIPFIWTEEHQKAFDRIKEALLSAPALALPDLTKPFTLYVDERAGVARGVLTQTLGPWRRPVAYLSKKLDPVASGWPTCLKAVAAVALLLKDADKLTLGQNVTVIASHSLESIVRQPPDRWMTNARMTHYQSLLLNERVSFAPPAVLNPATLLPVESEATPVHRCSEILAEETGTRRDLKDQPLPGVPAWYTDGSSFIAEGKRRAGAAIVDGKRTVWASSLPEGTSAQKAELVALTQALRLAEGKDINIYTDSRYAFATAHIHGAIYKQRGWLTSAGKDIKNKEEILALLEAIHLPKRVAIIHCPGHQKGNDPVATGNRRADEAAKQAALSTRVLAETTKPAGKRTADGSEFEKRTADGSEFESPKKKAKVE

SEQ ID NO: 7163 - protein, 2096 aa, synthetic construct
MPAAKRVKLDGGDKKYSIGLDIGTNSVGWAVITDEYKVPSKKFKVLGNTDRHSIKKNLIGALLFDSGETAEATRLKRTARRRYTRRKNRICYLQEIFSNEMAKVDDSFFHRLEESFLVEEDKKHERHPIFGNIVDEVAYHEKYPTIYHLRKKLVDSTDKADLRLIYLALAHMIKFRGHFLIEGDLNPDNSDVDKLFIQLVQTYNQLFEENPINASGVDAKAILSARLSKSRRLENLIAQLPGEKKNGLFGNLIALSLGLTPNFKSNFDLAEDAKLQLSKDTYDDDLDNLLAQIGDQYADLFLAAKNLSDAILLSDILRVNTEITKAPLSASMIKRYDEHHQDLTLLKALVRQQLPEKYKEIFFDQSKNGYAGYIDGGASQEEFYKFIKPILEKMDGTEELLVKLNREDLLRKQRTFDNGSIPHQIHLGELHAILRRQEDFYPFLKDNREKIEKILTFRIPYYVGPLARGNSRFAWMTRKSEETITPWNFEEVVDKGASAQSFIERMTNFDKNLPNEKVLPKHSLLYEYFTVYNELTKVKYVTEGMRKPAFLSGEQKKAIVDLLFKTNRKVTVKQLKEDYFKKIECFDSVEISGVEDRFNASLGTYHDLLKIIKDKDFLDNEENEDILEDIVLTLTLFEDREMIEERLKTYAHLFDDKVMKQLKRRRYTGWGRLSRKLINGIRDKQSGKTILDFLKSDGFANRNFMQLIHDDSLTFKEDIQKAQVSGQGDSLHEHIANLAGSPAIKKGILQTVKVVDELVKVMGRHKPENIVIEMARENQTTQKGQKNSRERMKRIEEGIKELGSQILKEHPVENTQLQNEKLYLYYLQNGRDMYVDQELDINRLSDYDVDHIVPQSFLKDDSIDNKVLTRSDKARGKSDNVPSEEVVKKMKNYWRQLLNAKLITQRKFDNLTKAERGGLSELDKAGFIKRQLVETRQITKHVAQILDSRMNTKYDENDKLIREVKVITLKSKLVSDFRKDFQFYKVREINNYHHAHDAYLNAVVGTALIKKYPKLESEFVYGDYKVYDVRKMIAKSEQEIGKATAKYFFYSNIMNFFKTEITLANGEIRKRPLIETNGETGEIVWDKGRDFATVRKVLSMPQVNIVKKTEVQTGGFSKESILPKRNSDKLIARKKDWDPKKYGGFDSPTVAYSVLVVAKVEKGKSKKLKSVKELLGITIMERSSFEKNPIDFLEAKGYKEVKKDLIIKLPKYSLFELENGRKRMLASAGELQKGNELALPSKYVNFLYLASHYEKLKGSPEDNEQKQLFVEQHKHYLDEIIEQISEFSKRVILADANLDKVLSAYNKHRDKPIREQAENIIHLFTLTNLGAPAAFKYFDTTIDRKRYTSTKEVLDATLIHQSITGLYETRIDLSQLGGDGGPAPGGSGSSGGTAPLEEEYRLFLEAPIQNVTLLEQWKREIPKVWAEINPPGLASTQAPIHVQLLSTALPVRVRQYPITLEAKRSLRETIRKFRAAGILRPVHSPWNTPLLPVRKSGTSEYRMVQDLREVNKRVETIHPTVPNPYTLLSLLPPDRIWYSVLDLKDAFFCIPLAPESQLIFAFEWADAEEGESGQLTWTRLPQGFKNSPTLFNEALNRDLQGFRLDHPSVSLLQYVDDLLIAADTQAACLSATRDLLMTLAELGYRVSGKKAQLCQEEVTYLGFKIHKGSRSLSNSRTQAILQIPVPKTKRQVREFLGTIGYCRLWIPGFAELAQPLYAATRPGNDPLVWGEKEEEAFQSLKLALTQPPALALPSLDKPFQLFVEETSGAAKGVLTQALGPWKRPVAYLSKRLDPVAAGWPRCLRAIAAAALLTREASKLTFGQDIEITSSHNLESLLRSPPDKWLTNARITQYQVLLLDPPRVRFKQTAALNPATLLPETDDTLPIHHCLDTLDSLTSTRPDLTDQPLAQAEATLFTDGSSYIRDGKRYAGAAVVTLDSVIWAEPLPIGTSAQKAELIALTKALEWSKDKSVNIYTDSRYAFATLHVHGMIYRERGWLTAGGKAIKNAPEILALLTAVWLPKRVAVMHCKGHQKDDAPTSTGNRRADEVAREVAIRPLSTQATISAGKRTADGSEFEKRTADGSEFESPKKKAKVE

SEQ ID NO: 7164 - protein, 2093 aa, synthetic construct
MPAAKRVKLDGGDKKYSIGLDIGTNSVGWAVITDEYKVPSKKFKVLGNTDRHSIKKNLIGALLFDSGETAEATRLKRTARRRYTRRKNRICYLQEIFSNEMAKVDDSFFHRLEESFLVEEDKKHERHPIFGNIVDEVAYHEKYPTIYHLRKKLVDSTDKADLRLIYLALAHMIKFRGHFLIEGDLNPDNSDVDKLFIQLVQTYNQLFEENPINASGVDAKAILSARLSKSRRLENLIAQLPGEKKNGLFGNLIALSLGLTPNFKSNFDLAEDAKLQLSKDTYDDDLDNLLAQIGDQYADLFLAAKNLSDAILLSDILRVNTEITKAPLSASMIKRYDEHHQDLTLLKALVRQQLPEKYKEIFFDQSKNGYAGYIDGGASQEEFYKFIKPILEKMDGTEELLVKLNREDLLRKQRTFDNGSIPHQIHLGELHAILRRQEDFYPFLKDNREKIEKILTFRIPYYVGPLARGNSRFAWMTRKSEETITPWNFEEVVDKGASAQSFIERMTNFDKNLPNEKVLPKHSLLYEYFTVYNELTKVKYVTEGMRKPAFLSGEQKKAIVDLLFKTNRKVTVKQLKEDYFKKIECFDSVEISGVEDRFNASLGTYHDLLKIIKDKDFLDNEENEDILEDIVLTLTLFEDREMIEERLKTYAHLFDDKVMKQLKRRRYTGWGRLSRKLINGIRDKQSGKTILDFLKSDGFANRNFMQLIHDDSLTFKEDIQKAQVSGQGDSLHEHIANLAGSPAIKKGILQTVKVVDELVKVMGRHKPENIVIEMARENQTTQKGQKNSRERMKRIEEGIKELGSQILKEHPVENTQLQNEKLYLYYLQNGRDMYVDQELDINRLSDYDVDHIVPQSFLKDDSIDNKVLTRSDKARGKSDNVPSEEVVKKMKNYWRQLLNAKLITQRKFDNLTKAERGGLSELDKAGFIKRQLVETRQITKHVAQILDSRMNTKYDENDKLIREVKVITLKSKLVSDFRKDFQFYKVREINNYHHAHDAYLNAVVGTALIKKYPKLESEFVYGDYKVYDVRKMIAKSEQEIGKATAKYFFYSNIMNFFKTEITLANGEIRKRPLIETNGETGEIVWDKGRDFATVRKVLSMPQVNIVKKTEVQTGGFSKESILPKRNSDKLIARKKDWDPKKYGGFDSPTVAYSVLVVAKVEKGKSKKLKSVKELLGITIMERSSFEKNPIDFLEAKGYKEVKKDLIIKLPKYSLFELENGRKRMLASAGELQKGNELALPSKYVNFLYLASHYEKLKGSPEDNEQKQLFVEQHKHYLDEIIEQISEFSKRVILADANLDKVLSAYNKHRDKPIREQAENIIHLFTLTNLGAPAAFKYFDTTIDRKRYTSTKEVLDATLIHQSITGLYETRIDLSQLGGDGGPAPGGSGSSGGTLQLEEEYRLFEPESTQKQEMDIWLKNFPQAWAETGGMGTAHCQAPVLIQLKATATPISIRQYPMPHEAYQGIKPHIRRMLDQGILKPCQSPWNTPLLPVKKPGTEDYRPVQDLREVNKRVEDIHPTVPNPYNLLSTLPPSHPWYTVLDLKDAFFCLRLHSESQLLFAFEWRDPEIGLSGQLTWTRLPQGFKNSPTLFNEALHSDLADFRVRYPALVLLQYVDDLLLAAATRTECLEGTKALLETLGNKGYRASAKKAQICLQEVTYLGYSLKDGQRWLTKARKEAILSIPVPKNSRQVREFLGKAGYCRLFIPGFAELAAPLYPLTRPGTLFQWGTEQQLAFEDIKKALLSSPALGLPDITKPFELFIDENSGFAKGVLVQKLGPWKRPVAYLSKKLDTVASGWPPCLRMVAAIAILVKDAGKLTLGQPLTILTSHPVEALVRQPPNKWLSNARMTHYQAMLLDAERVHFGPTVSLNPATLLPLPSGGNHHDCLQILAETHGTRPDLTDQPLPDADLTWYTDGSSFIRNGEREAGAAVTTESEVIWAAPLPPGTSAQRAELIALTQALKMAEGKKLTVYTDSRYAFATTHVHGEIYRRRGWLTSEGKEIKNKNEILALLEALFLPKRLSIIHCPGHQKGDSPQAKGNRLADDTAKKAATETHSSLTVLPAGKRTADGSEFEKRTADGSEFESPKKKAKVE

SEQ ID NO: 7165 - protein, 2174 aa, synthetic construct
MPAAKRVKLDGGDKKYSIGLDIGTNSVGWAVITDEYKVPSKKFKVLGNTDRHSIKKNLIGALLFDSGETAEATRLKRTARRRYTRRKNRICYLQEIFSNEMAKVDDSFFHRLEESFLVEEDKKHERHPIFGNIVDEVAYHEKYPTIYHLRKKLVDSTDKADLRLIYLALAHMIKFRGHFLIEGDLNPDNSDVDKLFIQLVQTYNQLFEENPINASGVDAKAILSARLSKSRRLENLIAQLPGEKKNGLFGNLIALSLGLTPNFKSNFDLAEDAKLQLSKDTYDDDLDNLLAQIGDQYADLFLAAKNLSDAILLSDILRVNTEITKAPLSASMIKRYDEHHQDLTLLKALVRQQLPEKYKEIFFDQSKNGYAGYIDGGASQEEFYKFIKPILEKMDGTEELLVKLNREDLLRKQRTFDNGSIPHQIHLGELHAILRRQEDFYPFLKDNREKIEKILTFRIPYYVGPLARGNSRFAWMTRKSEETITPWNFEEVVDKGASAQSFIERMTNFDKNLPNEKVLPKHSLLYEYFTVYNELTKVKYVTEGMRKPAFLSGEQKKAIVDLLFKTNRKVTVKQLKEDYFKKIECFDSVEISGVEDRFNASLGTYHDLLKIIKDKDFLDNEENEDILEDIVLTLTLFEDREMIEERLKTYAHLFDDKVMKQLKRRRYTGWGRLSRKLINGIRDKQSGKTILDFLKSDGFANRNFMQLIHDDSLTFKEDIQKAQVSGQGDSLHEHIANLAGSPAIKKGILQTVKVVDELVKVMGRHKPENIVIEMARENQTTQKGQKNSRERMKRIEEGIKELGSQILKEHPVENTQLQNEKLYLYYLQNGRDMYVDQELDINRLSDYDVDHIVPQSFLKDDSIDNKVLTRSDKARGKSDNVPSEEVVKKMKNYWRQLLNAKLITQRKFDNLTKAERGGLSELDKAGFIKRQLVETRQITKHVAQILDSRMNTKYDENDKLIREVKVITLKSKLVSDFRKDFQFYKVREINNYHHAHDAYLNAVVGTALIKKYPKLESEFVYGDYKVYDVRKMIAKSEQEIGKATAKYFFYSNIMNFFKTEITLANGEIRKRPLIETNGETGEIVWDKGRDFATVRKVLSMPQVNIVKKTEVQTGGFSKESILPKRNSDKLIARKKDWDPKKYGGFDSPTVAYSVLVVAKVEKGKSKKLKSVKELLGITIMERSSFEKNPIDFLEAKGYKEVKKDLIIKLPKYSLFELENGRKRMLASAGELQKGNELALPSKYVNFLYLASHYEKLKGSPEDNEQKQLFVEQHKHYLDEIIEQISEFSKRVILADANLDKVLSAYNKHRDKPIREQAENIIHLFTLTNLGAPAAFKYFDTTIDRKRYTSTKEVLDATLIHQSITGLYETRIDLSQLGGDGGPAPGGSGSSGGMNPLQLLQPLPAEIKGTKLLAHWNSGATITCIPESFLEDEQPIKKTLIKTIHGEKQQNVYYVTFKVKGRKVEAEVIASPYEYILLSPTDVPWLTQQPLQLTILVPLQEYQEKILSKTALPEDQKQQLKTLFVKYDNLWQHWENQVGHRKIRPHNIATGDYPPRPQKQYPINPKAKPSIQIVIDDLLKQGVLTPQNSTMNTPVYPVPKPDGRWRMVLDYREVNKTIPLTAAQNQHSAGILATIVRQKYKTTLDLANGFWAHPITPESYWLTAFTWQGKQYCWTRLPQGFLNSPALFTADVVDLLKEIPNVQVYVDDIYLSHDDPKEHVQQLEKVFQILLQAGYVVSLKKSEIGQKTVEFLGFNITKEGRGLTDTFKTKLLNITPPKDLKQLQSILGLLNFARNFIPNFAELVQPLYNLIASAKGKYIEWSEENTKQLNMVIEALNTASNLEERLPEQRLVIKVNTSPSAGYVRYYNETGKKPIMYLNYVFSKAELKFSMLEKLLTTMHKALIKAMDLAMGQEILVYSPIVSMTKIQKTPLPERKALPIRWITWMTYLEDPRIQFHYDKTLPELKHIPDVYTSSQSPVKHPSQYEGVFYTDGSAIKSPDPTKSNNAGMGIVHATYKPEYQVLNQWSIPLGNHTAQMAEIAAVEFACKKALKIPGPVLVITDSFYVAESANKELPYWKSNGFVNNKKKPLKHISKWKSIAECLSMKPDITIQHEKGISLQIPVFILKGNALADKLATQGSYVVNAGKRTADGSEFEKRTADGSEFESPKKKAKVE

SEQ ID NO: 7166 - protein, 2085 aa, synthetic construct
MPAAKRVKLDGGDKKYSIGLDIGTNSVGWAVITDEYKVPSKKFKVLGNTDRHSIKKNLIGALLFDSGETAEATRLKRTARRRYTRRKNRICYLQEIFSNEMAKVDDSFFHRLEESFLVEEDKKHERHPIFGNIVDEVAYHEKYPTIYHLRKKLVDSTDKADLRLIYLALAHMIKFRGHFLIEGDLNPDNSDVDKLFIQLVQTYNQLFEENPINASGVDAKAILSARLSKSRRLENLIAQLPGEKKNGLFGNLIALSLGLTPNFKSNFDLAEDAKLQLSKDTYDDDLDNLLAQIGDQYADLFLAAKNLSDAILLSDILRVNTEITKAPLSASMIKRYDEHHQDLTLLKALVRQQLPEKYKEIFFDQSKNGYAGYIDGGASQEEFYKFIKPILEKMDGTEELLVKLNREDLLRKQRTFDNGSIPHQIHLGELHAILRRQEDFYPFLKDNREKIEKILTFRIPYYVGPLARGNSRFAWMTRKSEETITPWNFEEVVDKGASAQSFIERMTNFDKNLPNEKVLPKHSLLYEYFTVYNELTKVKYVTEGMRKPAFLSGEQKKAIVDLLFKTNRKVTVKQLKEDYFKKIECFDSVEISGVEDRFNASLGTYHDLLKIIKDKDFLDNEENEDILEDIVLTLTLFEDREMIEERLKTYAHLFDDKVMKQLKRRRYTGWGRLSRKLINGIRDKQSGKTILDFLKSDGFANRNFMQLIHDDSLTFKEDIQKAQVSGQGDSLHEHIANLAGSPAIKKGILQTVKVVDELVKVMGRHKPENIVIEMARENQTTQKGQKNSRERMKRIEEGIKELGSQILKEHPVENTQLQNEKLYLYYLQNGRDMYVDQELDINRLSDYDVDHIVPQSFLKDDSIDNKVLTRSDKARGKSDNVPSEEVVKKMKNYWRQLLNAKLITQRKFDNLTKAERGGLSELDKAGFIKRQLVETRQITKHVAQILDSRMNTKYDENDKLIREVKVITLKSKLVSDFRKDFQFYKVREINNYHHAHDAYLNAVVGTALIKKYPKLESEFVYGDYKVYDVRKMIAKSEQEIGKATAKYFFYSNIMNFFKTEITLANGEIRKRPLIETNGETGEIVWDKGRDFATVRKVLSMPQVNIVKKTEVQTGGFSKESILPKRNSDKLIARKKDWDPKKYGGFDSPTVAYSVLVVAKVEKGKSKKLKSVKELLGITIMERSSFEKNPIDFLEAKGYKEVKKDLIIKLPKYSLFELENGRKRMLASAGELQKGNELALPSKYVNFLYLASHYEKLKGSPEDNEQKQLFVEQHKHYLDEIIEQISEFSKRVILADANLDKVLSAYNKHRDKPIREQAENIIHLFTLTNLGAPAAFKYFDTTIDRKRYTSTKEVLDATLIHQSITGLYETRIDLSQLGGDGGPAPGGSGSSGGVPWLTQQPLQLTILVPLQEYQEKILSKTALPEDQKQQLKTLFVKYDNLWQHWENQVGHRKIRPHNIATGDYPPRPQKQYPINPKAKPSIQIVIDDLLKQGVLTPQNSTMNTPVYPVPKPDGRWRMVLDYREVNKTIPLTAAQNQHSAGILATIVRQKYKTTLDLANGFWAHPITPESYWLTAFTWQGKQYCWTRLPQGFLNSPALFNADVVDLLKEIPNVQVYVDDIYLSHDDPKEHVQQLEKVFQILLQAGYVVSLKKSEIGQKTVEFLGFNITKEGRGLTDTFKTKLLNITPPKDLKQLQSILGLLNFARNFIPNFAELVQPLYNLIAPAKGKYIEWSEENTKQLNMVIEALNTASNLEERLPEQRLVIKVNTSPSAGYVRYYNETGKKPIMYLNYVFSKAELKFSMLEKLLTTMHKALIKAMDLAMGQEILVYSPIVSMTKIQKTPLPERKALPIRWITWMTYLEDPRIQFHYDKTLPELKHIPDVYTSSQSPVKHPSQYEGVFYTDGSAIKSPDPTKSNNAGMGIVHATYKPEYQVLNQWSIPLGNHTAQMAEIAAVEFACKKALKIPGPVLVITDSFYVAESANKELPYWKSNGFVNNKKKPLKHISKWKSIAECLSMKPDITIQHEKGISLQIPVFILKGNALADKLATQGSYVVNAGKRTADGSEFEKRTADGSEFESPKKKAKVE

SEQ ID NO: 7167 - protein, 2092 aa, synthetic construct
MPAAKRVKLDGGDKKYSIGLDIGTNSVGWAVITDEYKVPSKKFKVLGNTDRHSIKKNLIGALLFDSGETAEATRLKRTARRRYTRRKNRICYLQEIFSNEMAKVDDSFFHRLEESFLVEEDKKHERHPIFGNIVDEVAYHEKYPTIYHLRKKLVDSTDKADLRLIYLALAHMIKFRGHFLIEGDLNPDNSDVDKLFIQLVQTYNQLFEENPINASGVDAKAILSARLSKSRRLENLIAQLPGEKKNGLFGNLIALSLGLTPNFKSNFDLAEDAKLQLSKDTYDDDLDNLLAQIGDQYADLFLAAKNLSDAILLSDILRVNTEITKAPLSASMIKRYDEHHQDLTLLKALVRQQLPEKYKEIFFDQSKNGYAGYIDGGASQEEFYKFIKPILEKMDGTEELLVKLNREDLLRKQRTFDNGSIPHQIHLGELHAILRRQEDFYPFLKDNREKIEKILTFRIPYYVGPLARGNSRFAWMTRKSEETITPWNFEEVVDKGASAQSFIERMTNFDKNLPNEKVLPKHSLLYEYFTVYNELTKVKYVTEGMRKPAFLSGEQKKAIVDLLFKTNRKVTVKQLKEDYFKKIECFDSVEISGVEDRFNASLGTYHDLLKIIKDKDFLDNEENEDILEDIVLTLTLFEDREMIEERLKTYAHLFDDKVMKQLKRRRYTGWGRLSRKLINGIRDKQSGKTILDFLKSDGFANRNFMQLIHDDSLTFKEDIQKAQVSGQGDSLHEHIANLAGSPAIKKGILQTVKVVDELVKVMGRHKPENIVIEMARENQTTQKGQKNSRERMKRIEEGIKELGSQILKEHPVENTQLQNEKLYLYYLQNGRDMYVDQELDINRLSDYDVDHIVPQSFLKDDSIDNKVLTRSDKARGKSDNVPSEEVVKKMKNYWRQLLNAKLITQRKFDNLTKAERGGLSELDKAGFIKRQLVETRQITKHVAQILDSRMNTKYDENDKLIREVKVITLKSKLVSDFRKDFQFYKVREINNYHHAHDAYLNAVVGTALIKKYPKLESEFVYGDYKVYDVRKMIAKSEQEIGKATAKYFFYSNIMNFFKTEITLANGEIRKRPLIETNGETGEIVWDKGRDFATVRKVLSMPQVNIVKKTEVQTGGFSKESILPKRNSDKLIARKKDWDPKKYGGFDSPTVAYSVLVVAKVEKGKSKKLKSVKELLGITIMERSSFEKNPIDFLEAKGYKEVKKDLIIKLPKYSLFELENGRKRMLASAGELQKGNELALPSKYVNFLYLASHYEKLKGSPEDNEQKQLFVEQHKHYLDEIIEQISEFSKRVILADANLDKVLSAYNKHRDKPIREQAENIIHLFTLTNLGAPAAFKYFDTTIDRKRYTSTKEVLDATLIHQSITGLYETRIDLSQLGGDGGPAPGGSGSSGGVLNLEEEYRLHEKPVPSSIDPSWLQLFPTVWAERAGMGLANQVPPVVVELRSGASPVAVRQYPMSKEAREGIRPHIQKFLDLGVLVPCRSPWNTPLLPVKKPGTNDYRPVQDLREINKRVQDIHPTVPNPYNLLSSLPPSYTWYSVLDLKDAFFCLRLHPNSQPLFAFEWKDPEKGNTGQLTWTRLPQGFKNSPTLFNEALHRDLAPFRALNPQVVLLQYVDDLLVAAPTYEDCKKGTQKLLQELSKLGYRVSAKKAQLCQREVTYLGYLLKEGKRWLTPARKATVMKIPVPTTPRQVREFLGTAGFCRLWIPGFASLAAPLYPLTKPSIPFIWTEEHQQAFDHIKKALLSAPALALPDLTKPFTLYIDERAGVARGVLTQTLGPWRRPVAYLSKKLDPVASGWPTCLKAVAAVALLLKDADKLTLGQNVTVIASHSLESIVRQPPDRWMTNARMTHYQSLLLNERVSFAPPAVLNPATLLPVESEATPVHRCSEILAEETGTRRDLEDQPLPGVPTWYTDGSSFITEGKRRAGAPIVDGKRTVWASSLPEGTSAQKAELVALTQALRLAEGKNINIYTDSRYAFATAHIHGAIYKQRGWLTSAGKDIKNKEEILALLEAIHLPRRVAIIHCPGHQRGSNPVATGNRRADEAAKQAALSTRVLAGTTKPAGKRTADGSEFEKRTADGSEFESPKKKAKVE

SEQ ID NO: 7168 - protein, 2216 aa, synthetic construct
MPAAKRVKLDGGDKKYSIGLDIGTNSVGWAVITDEYKVPSKKFKVLGNTDRHSIKKNLIGALLFDSGETAEATRLKRTARRRYTRRKNRICYLQEIFSNEMAKVDDSFFHRLEESFLVEEDKKHERHPIFGNIVDEVAYHEKYPTIYHLRKKLVDSTDKADLRLIYLALAHMIKFRGHFLIEGDLNPDNSDVDKLFIQLVQTYNQLFEENPINASGVDAKAILSARLSKSRRLENLIAQLPGEKKNGLFGNLIALSLGLTPNFKSNFDLAEDAKLQLSKDTYDDDLDNLLAQIGDQYADLFLAAKNLSDAILLSDILRVNTEITKAPLSASMIKRYDEHHQDLTLLKALVRQQLPEKYKEIFFDQSKNGYAGYIDGGASQEEFYKFIKPILEKMDGTEELLVKLNREDLLRKQRTFDNGSIPHQIHLGELHAILRRQEDFYPFLKDNREKIEKILTFRIPYYVGPLARGNSRFAWMTRKSEETITPWNFEEVVDKGASAQSFIERMTNFDKNLPNEKVLPKHSLLYEYFTVYNELTKVKYVTEGMRKPAFLSGEQKKAIVDLLFKTNRKVTVKQLKEDYFKKIECFDSVEISGVEDRFNASLGTYHDLLKIIKDKDFLDNEENEDILEDIVLTLTLFEDREMIEERLKTYAHLFDDKVMKQLKRRRYTGWGRLSRKLINGIRDKQSGKTILDFLKSDGFANRNFMQLIHDDSLTFKEDIQKAQVSGQGDSLHEHIANLAGSPAIKKGILQTVKVVDELVKVMGRHKPENIVIEMARENQTTQKGQKNSRERMKRIEEGIKELGSQILKEHPVENTQLQNEKLYLYYLQNGRDMYVDQELDINRLSDYDVDHIVPQSFLKDDSIDNKVLTRSDKARGKSDNVPSEEVVKKMKNYWRQLLNAKLITQRKFDNLTKAERGGLSELDKAGFIKRQLVETRQITKHVAQILDSRMNTKYDENDKLIREVKVITLKSKLVSDFRKDFQFYKVREINNYHHAHDAYLNAVVGTALIKKYPKLESEFVYGDYKVYDVRKMIAKSEQEIGKATAKYFFYSNIMNFFKTEITLANGEIRKRPLIETNGETGEIVWDKGRDFATVRKVLSMPQVNIVKKTEVQTGGFSKESILPKRNSDKLIARKKDWDPKKYGGFDSPTVAYSVLVVAKVEKGKSKKLKSVKELLGITIMERSSFEKNPIDFLEAKGYKEVKKDLIIKLPKYSLFELENGRKRMLASAGELQKGNELALPSKYVNFLYLASHYEKLKGSPEDNEQKQLFVEQHKHYLDEIIEQISEFSKRVILADANLDKVLSAYNKHRDKPIREQAENIIHLFTLTNLGAPAAFKYFDTTIDRKRYTSTKEVLDATLIHQSITGLYETRIDLSQLGGDGGPAPGGSGSSGGTLGDQGSRGSDPLPEPRVTLTVEGIPTEFLVNTGAEHSVLTKPMGKMGSKRTVVAGATGSKVYPWTTKRLLKIGQKQVTHSFLVIPECPAPLLGRDLLTKLKAQIQFSTEGPQVTWEDRPAMCLVLNLEEEYRLHEKPVPPSIDPSWLQLFPMVWAEKAGMGLANQVPPVVVELKSDASPVAVRQYPMSKEAREGIRPHIQRFLDLGILVPCQSPWNTPLLPVKKPGTNDYRPVQDLREVNKRVQDIHPTVPNPYNLLSSLPPSHTWYSVLDLKDAFFCLKLHPNSQPLFAFEWRDPEKGNTGQLTWTRLPQGFKNSPTLFDEALHRDLASFRALNPQVVMLQYVDDLLVAAPTYRDCKEGTRRLLQELSKLGYRVSAKKAQLCREEVTYLGYLLKGGKRWLTPARKATVMKIPTPTTPRQVREFLGTAGFCRLWIPGFASLAAPLYPLTREKVPFTWTEAHQEAFGRIKEALLSAPALALPDLTKPFALYVDEKEGVARGVLTQTLGPWRRPVAYLSKKLDPVASGWPTCLKAIAAVALLLKDADKLTLGQNVLVIAPHNLESIVRQPPDRWMTNARMTHYQSLLLNERVSFAPPAILNPATLLPVESDDTPIHICSEILAEETGTRPDLRDQPLPGVPAWYTDGSSFIMDGRRQAGAAIVDNKRTVWASNLPEGTSAQKAELIALTQALRLAEGKSINIYTDSRYAFATAHVHGAIYKQRGLLTSAGKDIKNKEEILALLEAIHLPKRVAIIHCPGHQRGTDPVATGNRKADEAAKQAAQSTRILTETTKNAGKRTADGSEFEKRTADGSEFESPKKKAKVE

SEQ ID NO: 7169 - protein, 2094 aa, synthetic construct
MPAAKRVKLDGGDKKYSIGLDIGTNSVGWAVITDEYKVPSKKFKVLGNTDRHSIKKNLIGALLFDSGETAEATRLKRTARRRYTRRKNRICYLQEIFSNEMAKVDDSFFHRLEESFLVEEDKKHERHPIFGNIVDEVAYHEKYPTIYHLRKKLVDSTDKADLRLIYLALAHMIKFRGHFLIEGDLNPDNSDVDKLFIQLVQTYNQLFEENPINASGVDAKAILSARLSKSRRLENLIAQLPGEKKNGLFGNLIALSLGLTPNFKSNFDLAEDAKLQLSKDTYDDDLDNLLAQIGDQYADLFLAAKNLSDAILLSDILRVNTEITKAPLSASMIKRYDEHHQDLTLLKALVRQQLPEKYKEIFFDQSKNGYAGYIDGGASQEEFYKFIKPILEKMDGTEELLVKLNREDLLRKQRTFDNGSIPHQIHLGELHAILRRQEDFYPFLKDNREKIEKILTFRIPYYVGPLARGNSRFAWMTRKSEETITPWNFEEVVDKGASAQSFIERMTNFDKNLPNEKVLPKHSLLYEYFTVYNELTKVKYVTEGMRKPAFLSGEQKKAIVDLLFKTNRKVTVKQLKEDYFKKIECFDSVEISGVEDRFNASLGTYHDLLKIIKDKDFLDNEENEDILEDIVLTLTLFEDREMIEERLKTYAHLFDDKVMKQLKRRRYTGWGRLSRKLINGIRDKQSGKTILDFLKSDGFANRNFMQLIHDDSLTFKEDIQKAQVSGQGDSLHEHIANLAGSPAIKKGILQTVKVVDELVKVMGRHKPENIVIEMARENQTTQKGQKNSRERMKRIEEGIKELGSQILKEHPVENTQLQNEKLYLYYLQNGRDMYVDQELDINRLSDYDVDHIVPQSFLKDDSIDNKVLTRSDKARGKSDNVPSEEVVKKMKNYWRQLLNAKLITQRKFDNLTKAERGGLSELDKAGFIKRQLVETRQITKHVAQILDSRMNTKYDENDKLIREVKVITLKSKLVSDFRKDFQFYKVREINNYHHAHDAYLNAVVGTALIKKYPKLESEFVYGDYKVYDVRKMIAKSEQEIGKATAKYFFYSNIMNFFKTEITLANGEIRKRPLIETNGETGEIVWDKGRDFATVRKVLSMPQVNIVKKTEVQTGGFSKESILPKRNSDKLIARKKDWDPKKYGGFDSPTVAYSVLVVAKVEKGKSKKLKSVKELLGITIMERSSFEKNPIDFLEAKGYKEVKKDLIIKLPKYSLFELENGRKRMLASAGELQKGNELALPSKYVNFLYLASHYEKLKGSPEDNEQKQLFVEQHKHYLDEIIEQISEFSKRVILADANLDKVLSAYNKHRDKPIREQAENIIHLFTLTNLGAPAAFKYFDTTIDRKRYTSTKEVLDATLIHQSITGLYETRIDLSQLGGDGGPAPGGSGSSGGLGIEDEYRLHETSTEPDVSLGSTWLSDFPQAWAETGGMGLAVRQAPLIIPLKATSTPVSIQQYPMSHEARLGIKPHIQRLLDQGILVPCQSPWNTPLLPVKKPGTNDYRPVQDLREVNKRVEDIHPTVPNPYNLLSGLPPSHQWYTVLDLKDAFFCLRLHPTSQPLFAFEWRDPGMGISGQLTWTRLPQGFKNSPTLFNEALHRDLADFRIQHPDLILLQYVDDILLAATSELDCQQGTRALLQTLGDLGYRASAKKAQICQKQVKYLGYLLREGQRWLTEARKETVMGQPVPKTPRQLREFLGKAGFCRLFIPGFAEMAAPLYPLTKPGTLFSWGPDQQKAYQEIKQALLTAPALGLPDLTKPFELFVDEKQGYAKGVLTQKLGPWRRPVAYLSKKLDPVAAGWPPCLRMVAAIAVLTKDAGKLTMGQPLVILAPHAVEALVKQPPDRWLSNARMTHYQAMLLDTDRVQFGPVVALNPATLLPLPEEGAPHDCLEILAETHGTRPDLTDQPIPDADHTWYTDGSSFLQEGQRKAGAAVTTETEVIWAGALPAGTSAQRAELIALTQALKMAEGKRLNVYTDSRYAFATAHIHGEIYRRRGWLTSEGREIKNKSEILALLKALFLPKRLSIIHCLGHQKGDSAEARGNRLADQAAREAAIKTPPDTSTLLIAGKRTADGSEFEKRTADGSEFESPKKKAKVE

SEQ ID NO: 7170 - protein, 2094 aa, synthetic construct
MPAAKRVKLDGGDKKYSIGLDIGTNSVGWAVITDEYKVPSKKFKVLGNTDRHSIKKNLIGALLFDSGETAEATRLKRTARRRYTRRKNRICYLQEIFSNEMAKVDDSFFHRLEESFLVEEDKKHERHPIFGNIVDEVAYHEKYPTIYHLRKKLVDSTDKADLRLIYLALAHMIKFRGHFLIEGDLNPDNSDVDKLFIQLVQTYNQLFEENPINASGVDAKAILSARLSKSRRLENLIAQLPGEKKNGLFGNLIALSLGLTPNFKSNFDLAEDAKLQLSKDTYDDDLDNLLAQIGDQYADLFLAAKNLSDAILLSDILRVNTEITKAPLSASMIKRYDEHHQDLTLLKALVRQQLPEKYKEIFFDQSKNGYAGYIDGGASQEEFYKFIKPILEKMDGTEELLVKLNREDLLRKQRTFDNGSIPHQIHLGELHAILRRQEDFYPFLKDNREKIEKILTFRIPYYVGPLARGNSRFAWMTRKSEETITPWNFEEVVDKGASAQSFIERMTNFDKNLPNEKVLPKHSLLYEYFTVYNELTKVKYVTEGMRKPAFLSGEQKKAIVDLLFKTNRKVTVKQLKEDYFKKIECFDSVEISGVEDRFNASLGTYHDLLKIIKDKDFLDNEENEDILEDIVLTLTLFEDREMIEERLKTYAHLFDDKVMKQLKRRRYTGWGRLSRKLINGIRDKQSGKTILDFLKSDGFANRNFMQLIHDDSLTFKEDIQKAQVSGQGDSLHEHIANLAGSPAIKKGILQTVKVVDELVKVMGRHKPENIVIEMARENQTTQKGQKNSRERMKRIEEGIKELGSQILKEHPVENTQLQNEKLYLYYLQNGRDMYVDQELDINRLSDYDVDHIVPQSFLKDDSIDNKVLTRSDKARGKSDNVPSEEVVKKMKNYWRQLLNAKLITQRKFDNLTKAERGGLSELDKAGFIKRQLVETRQITKHVAQILDSRMNTKYDENDKLIREVKVITLKSKLVSDFRKDFQFYKVREINNYHHAHDAYLNAVVGTALIKKYPKLESEFVYGDYKVYDVRKMIAKSEQEIGKATAKYFFYSNIMNFFKTEITLANGEIRKRPLIETNGETGEIVWDKGRDFATVRKVLSMPQVNIVKKTEVQTGGFSKESILPKRNSDKLIARKKDWDPKKYGGFDSPTVAYSVLVVAKVEKGKSKKLKSVKELLGITIMERSSFEKNPIDFLEAKGYKEVKKDLIIKLPKYSLFELENGRKRMLASAGELQKGNELALPSKYVNFLYLASHYEKLKGSPEDNEQKQLFVEQHKHYLDEIIEQISEFSKRVILADANLDKVLSAYNKHRDKPIREQAENIIHLFTLTNLGAPAAFKYFDTTIDRKRYTSTKEVLDATLIHQSITGLYETRIDLSQLGGDGGPAPGGSGSSGGTLGIEDEYRLHETSTEPDVSLGSTWLSDFPQAWAETGGMGLAVRQAPLIIPLKATSTPVSIQQYPMSHEARLGIKPHIQRLLDQGILVPCQSPWNTPLLPVKKPGTNDYRPVQDLREVNKRVEDIHPTVPNPYNLLSGLPPSHQWYTVLDLKDAFFCLRLHPTSQPLFAFEWRDPGMGISGQLTWTRLPQGFKNSPTLFNEALHRDLADFRIQHPDLILLQYVDDILLAATSELDCQQGTRALLQTLGDLGYRASAKKAQICQKQVKYLGYLLREGQRWLTEARKETVMGQPVPKTPRQLREFLGTAGFCRLWIPGFAEMAAPLYPLTKPGTLFSWGPDQQKAYQEIKQALLTAPALGLPDLTKPFELFVDEKQGYAKGVLTQKLGPWRRPVAYLSKKLDPVAAGWPPCLRMVAAIAVLTKDAGKLTMGQPLVILAPHAVEALVKQPPDRWLSNARMTHYQAMLLDTDRVQFGPVVALNPATLLPLPEEGAPHDCLEILAETHGTRPDLTDQPIPDADHTWYTDGSSFLQEGQRKAGAAVTTETEVIWAGALPAGTSAQRAELIALTQALKMAEGKRLNVYTDSRYAFATAHIHGEIYRRRGWLTSEGREIKNKSEILALLKALFLPKRLSIIHCLGHQKGDSAEARGNRLADQAAREAAIKTPPDTSTLLAGKRTADGSEFEKRTADGSEFESPKKKAKVE

SEQ ID NO: 7171 - protein, 2094 aa, synthetic construct
MPAAKRVKLDGGDKKYSIGLDIGTNSVGWAVITDEYKVPSKKFKVLGNTDRHSIKKNLIGALLFDSGETAEATRLKRTARRRYTRRKNRICYLQEIFSNEMAKVDDSFFHRLEESFLVEEDKKHERHPIFGNIVDEVAYHEKYPTIYHLRKKLVDSTDKADLRLIYLALAHMIKFRGHFLIEGDLNPDNSDVDKLFIQLVQTYNQLFEENPINASGVDAKAILSARLSKSRRLENLIAQLPGEKKNGLFGNLIALSLGLTPNFKSNFDLAEDAKLQLSKDTYDDDLDNLLAQIGDQYADLFLAAKNLSDAILLSDILRVNTEITKAPLSASMIKRYDEHHQDLTLLKALVRQQLPEKYKEIFFDQSKNGYAGYIDGGASQEEFYKFIKPILEKMDGTEELLVKLNREDLLRKQRTFDNGSIPHQIHLGELHAILRRQEDFYPFLKDNREKIEKILTFRIPYYVGPLARGNSRFAWMTRKSEETITPWNFEEVVDKGASAQSFIERMTNFDKNLPNEKVLPKHSLLYEYFTVYNELTKVKYVTEGMRKPAFLSGEQKKAIVDLLFKTNRKVTVKQLKEDYFKKIECFDSVEISGVEDRFNASLGTYHDLLKIIKDKDFLDNEENEDILEDIVLTLTLFEDREMIEERLKTYAHLFDDKVMKQLKRRRYTGWGRLSRKLINGIRDKQSGKTILDFLKSDGFANRNFMQLIHDDSLTFKEDIQKAQVSGQGDSLHEHIANLAGSPAIKKGILQTVKVVDELVKVMGRHKPENIVIEMARENQTTQKGQKNSRERMKRIEEGIKELGSQILKEHPVENTQLQNEKLYLYYLQNGRDMYVDQELDINRLSDYDVDHIVPQSFLKDDSIDNKVLTRSDKARGKSDNVPSEEVVKKMKNYWRQLLNAKLITQRKFDNLTKAERGGLSELDKAGFIKRQLVETRQITKHVAQILDSRMNTKYDENDKLIREVKVITLKSKLVSDFRKDFQFYKVREINNYHHAHDAYLNAVVGTALIKKYPKLESEFVYGDYKVYDVRKMIAKSEQEIGKATAKYFFYSNIMNFFKTEITLANGEIRKRPLIETNGETGEIVWDKGRDFATVRKVLSMPQVNIVKKTEVQTGGFSKESILPKRNSDKLIARKKDWDPKKYGGFDSPTVAYSVLVVAKVEKGKSKKLKSVKELLGITIMERSSFEKNPIDFLEAKGYKEVKKDLIIKLPKYSLFELENGRKRMLASAGELQKGNELALPSKYVNFLYLASHYEKLKGSPEDNEQKQLFVEQHKHYLDEIIEQISEFSKRVILADANLDKVLSAYNKHRDKPIREQAENIIHLFTLTNLGAPAAFKYFDTTIDRKRYTSTKEVLDATLIHQSITGLYETRIDLSQLGGDGGPAPGGSGSSGGTLNIEDEYRLHETSKEPDVSLGSTWLSDFPQAWAETGGMGLAVRQAPLIIPLKATSTPVSIKQYPMSQEARLGIKPHIQRLLDQGILVPCQSPWNTPLLPVKKPGTNDYRPVQDLREVNKRVEDIHPTVPNPYNLLSGLPPSHQWYTVLDLKDAFFCLRLHPTSQPLFAFEWRDPEMGISGQLTWTRLPQGFKNSPTLFNEALHRDLAGFRIQHPDLILLQYVDDLLLAATSELDCQQGTRALLQTLGDLGYRASAKKAQICQKQVKYLGYLLKEGQRWLTEARKETVMGQPIPKTPRQLREFLGTAGFCRLWIPGFAEMAAPLYPLTKPGTLFNWGPDQQKAFQEIKQALLTAPALGLPDLTKPFELFVDEKQGYAKGVLTQKLGPWRRPVAYLSKKLDPVAAGWPPCLRMVAAIAVLTKDAGKLTMGQPLVILAPHAVEALVKQPPDRWLSNARMTHYQALLLDTDRVQFGPVVALNPATLLPLPEEGLQHDCLDILAEAHGTRSDLMDQPLPDADHTWYTDGSSFLQEGQRKAGAAVTTETEVIWARALPAGTSAQRAELIALTQALKMAEGKKLNVYTDSRYAFATAHIHGEIYRRRGWLTSEGKEIKNKDEILALLKALFLPKRLSIIHCPGHQKGNSAEARGNRMADQAAREVATRETPETSTLLAGKRTADGSEFEKRTADGSEFESPKKKAKVE

SEQ ID NO: 7172 - protein, 2114 aa, synthetic construct
MPAAKRVKLDGGDKKYSIGLDIGTNSVGWAVITDEYKVPSKKFKVLGNTDRHSIKKNLIGALLFDSGETAEATRLKRTARRRYTRRKNRICYLQEIFSNEMAKVDDSFFHRLEESFLVEEDKKHERHPIFGNIVDEVAYHEKYPTIYHLRKKLVDSTDKADLRLIYLALAHMIKFRGHFLIEGDLNPDNSDVDKLFIQLVQTYNQLFEENPINASGVDAKAILSARLSKSRRLENLIAQLPGEKKNGLFGNLIALSLGLTPNFKSNFDLAEDAKLQLSKDTYDDDLDNLLAQIGDQYADLFLAAKNLSDAILLSDILRVNTEITKAPLSASMIKRYDEHHQDLTLLKALVRQQLPEKYKEIFFDQSKNGYAGYIDGGASQEEFYKFIKPILEKMDGTEELLVKLNREDLLRKQRTFDNGSIPHQIHLGELHAILRRQEDFYPFLKDNREKIEKILTFRIPYYVGPLARGNSRFAWMTRKSEETITPWNFEEVVDKGASAQSFIERMTNFDKNLPNEKVLPKHSLLYEYFTVYNELTKVKYVTEGMRKPAFLSGEQKKAIVDLLFKTNRKVTVKQLKEDYFKKIECFDSVEISGVEDRFNASLGTYHDLLKIIKDKDFLDNEENEDILEDIVLTLTLFEDREMIEERLKTYAHLFDDKVMKQLKRRRYTGWGRLSRKLINGIRDKQSGKTILDFLKSDGFANRNFMQLIHDDSLTFKEDIQKAQVSGQGDSLHEHIANLAGSPAIKKGILQTVKVVDELVKVMGRHKPENIVIEMARENQTTQKGQKNSRERMKRIEEGIKELGSQILKEHPVENTQLQNEKLYLYYLQNGRDMYVDQELDINRLSDYDVDHIVPQSFLKDDSIDNKVLTRSDKARGKSDNVPSEEVVKKMKNYWRQLLNAKLITQRKFDNLTKAERGGLSELDKAGFIKRQLVETRQITKHVAQILDSRMNTKYDENDKLIREVKVITLKSKLVSDFRKDFQFYKVREINNYHHAHDAYLNAVVGTALIKKYPKLESEFVYGDYKVYDVRKMIAKSEQEIGKATAKYFFYSNIMNFFKTEITLANGEIRKRPLIETNGETGEIVWDKGRDFATVRKVLSMPQVNIVKKTEVQTGGFSKESILPKRNSDKLIARKKDWDPKKYGGFDSPTVAYSVLVVAKVEKGKSKKLKSVKELLGITIMERSSFEKNPIDFLEAKGYKEVKKDLIIKLPKYSLFELENGRKRMLASAGELQKGNELALPSKYVNFLYLASHYEKLKGSPEDNEQKQLFVEQHKHYLDEIIEQISEFSKRVILADANLDKVLSAYNKHRDKPIREQAENIIHLFTLTNLGAPAAFKYFDTTIDRKRYTSTKEVLDATLIHQSITGLYETRIDLSQLGGDGGPAPGGSGSSGGTLNIEDEYRLHETSKEPDVSLGSTWLSDFPQAWAETGGMGLAVRQAPLIIPLKATSTPVSIKQYPMSQEARLGIKPHIQRLLDQGILVPCQSPWNTPLLPVKKPGTNDYRPVQDLREVNKRVEDIHPTVPNPYNLLSGLPPSHQWYTVLDLKDAFFCLRLHPTSQPLFAFEWRDPEMGISGQLTWTRLPQGFKNSPTLFNEALHRDLADFRIQHPDLILLQYVDDLLLAATSELDCQQGTRALLQTLGNLGYRASAKKAQICQKQVKYLGYLLKEGQRWLTEARKETVMGQPTPKTPRQLREFLGKAGFCRLFIPGFAEMAAPLYPLTKPGTLFNWGPDQQKAYQEIKQALLTAPALGLPDLTKPFELFVDEKQGYAKGVLTQKLGPWRRPVAYLSKKLDPVAAGWPPCLRMVAAIAVLTKDAGKLTMGQPLVILAPHAVEALVKQPPDRWLSNARMTHYQALLLDTDRVQFGPVVALNPATLLPLPEEGLQHNCLDILAEAHGTRPDLTDQPLPDADHTWYTDGSSLLQEGQRKAGAAVTTETEVIWAKALPAGTSAQRAELIALTQALKMAEGKKLNVYTDSRYAFATAHIHGEIYRRRGWLTSEGKEIKNKDEILALLKALFLPKRLSIIHCPGHQKGHSAEARGNRMADQAARKAAITETPDTSTLLIENSSPSGGSKRTADGSEFEAGKRTADGSEFEKRTADGSEFESPKKKAKVE

SEQ ID NO: 7173 - protein, 2094 aa, synthetic construct
MPAAKRVKLDGGDKKYSIGLDIGTNSVGWAVITDEYKVPSKKFKVLGNTDRHSIKKNLIGALLFDSGETAEATRLKRTARRRYTRRKNRICYLQEIFSNEMAKVDDSFFHRLEESFLVEEDKKHERHPIFGNIVDEVAYHEKYPTIYHLRKKLVDSTDKADLRLIYLALAHMIKFRGHFLIEGDLNPDNSDVDKLFIQLVQTYNQLFEENPINASGVDAKAILSARLSKSRRLENLIAQLPGEKKNGLFGNLIALSLGLTPNFKSNFDLAEDAKLQLSKDTYDDDLDNLLAQIGDQYADLFLAAKNLSDAILLSDILRVNTEITKAPLSASMIKRYDEHHQDLTLLKALVRQQLPEKYKEIFFDQSKNGYAGYIDGGASQEEFYKFIKPILEKMDGTEELLVKLNREDLLRKQRTFDNGSIPHQIHLGELHAILRRQEDFYPFLKDNREKIEKILTFRIPYYVGPLARGNSRFAWMTRKSEETITPWNFEEVVDKGASAQSFIERMTNFDKNLPNEKVLPKHSLLYEYFTVYNELTKVKYVTEGMRKPAFLSGEQKKAIVDLLFKTNRKVTVKQLKEDYFKKIECFDSVEISGVEDRFNASLGTYHDLLKIIKDKDFLDNEENEDILEDIVLTLTLFEDREMIEERLKTYAHLFDDKVMKQLKRRRYTGWGRLSRKLINGIRDKQSGKTILDFLKSDGFANRNFMQLIHDDSLTFKEDIQKAQVSGQGDSLHEHIANLAGSPAIKKGILQTVKVVDELVKVMGRHKPENIVIEMARENQTTQKGQKNSRERMKRIEEGIKELGSQILKEHPVENTQLQNEKLYLYYLQNGRDMYVDQELDINRLSDYDVDHIVPQSFLKDDSIDNKVLTRSDKARGKSDNVPSEEVVKKMKNYWRQLLNAKLITQRKFDNLTKAERGGLSELDKAGFIKRQLVETRQITKHVAQILDSRMNTKYDENDKLIREVKVITLKSKLVSDFRKDFQFYKVREINNYHHAHDAYLNAVVGTALIKKYPKLESEFVYGDYKVYDVRKMIAKSEQEIGKATAKYFFYSNIMNFFKTEITLANGEIRKRPLIETNGETGEIVWDKGRDFATVRKVLSMPQVNIVKKTEVQTGGFSKESILPKRNSDKLIARKKDWDPKKYGGFDSPTVAYSVLVVAKVEKGKSKKLKSVKELLGITIMERSSFEKNPIDFLEAKGYKEVKKDLIIKLPKYSLFELENGRKRMLASAGELQKGNELALPSKYVNFLYLASHYEKLKGSPEDNEQKQLFVEQHKHYLDEIIEQISEFSKRVILADANLDKVLSAYNKHRDKPIREQAENIIHLFTLTNLGAPAAFKYFDTTIDRKRYTSTKEVLDATLIHQSITGLYETRIDLSQLGGDGGPAPGGSGSSGGTLNIEDEHRLHETSKEPDVSLGSTWLSDFPQAWAETGGMGLAVRQAPLIIPLKATSTPVSIKQYPMSQEARLGIKPHIQRLLDQGILVPCQSPWNTPLLPVKKPGTNDYRPVQDLREVNKRVEDIHPTVPNPYNLLSGLPPSHQWYTVLDLKDAFFCLRLHPTSQPLFAFEWRDPEMGISGQLTWTRLPQGFKNSPTLFNEALHRDLADFRIQHPDLILLQYVDDLLLAATSELDCQQGTRALLQTLGNLGYRASAKKAQICQKQVKYLGYLLKEGQRWLTEARKETVMGQPTPKTPRQLREFLGTAGFCRLWIPGFAEMAAPLYPLTKPGTLFNWGPDQQKAYQEIKQALLTAPALGLPDLTKPFELFVDEKQGYAKGVLTQKLGPWRRPVAYLSKKLDPVAAGWPPCLRMVAAIAVLTKDAGKLTMGQPLVILAPHAVEALVKQPPDRWLSNARMTHYQALLLDTDRVQFGPVVALNPATLLPLPEEGLQHNCLDILAEAHGTRPDLTDQPLPDADHTWYTDGSSLLQEGQRKAGAAVTTETEVIWAKALPAGTSAQRAELIALTQALKMAEGKKLNVYTDSRYAFATAHIHGEIYRRRGWLTSEGKEIKNKDEILALLKALFLPKRLSIIHCPGHQKGHSAEARGNRMADQAARKAAITETPDTSTLLAGKRTADGSEFEKRTADGSEFESPKKKAKVE

SEQ ID NO: 7174 - protein, 2114 aa, synthetic construct; identical to SEQ ID NO: 7172

SEQ ID NO: 7175 - protein, 2094 aa, synthetic construct
MPAAKRVKLDGGDKKYSIGLDIGTNSVGWAVITDEYKVPSKKFKVLGNTDRHSIKKNLIGALLFDSGETAEATRLKRTARRRYTRRKNRICYLQEIFSNEMAKVDDSFFHRLEESFLVEEDKKHERHPIFGNIVDEVAYHEKYPTIYHLRKKLVDSTDKADLRLIYLALAHMIKFRGHFLIEGDLNPDNSDVDKLFIQLVQTYNQLFEENPINASGVDAKAILSARLSKSRRLENLIAQLPGEKKNGLFGNLIALSLGLTPNFKSNFDLAEDAKLQLSKDTYDDDLDNLLAQIGDQYADLFLAAKNLSDAILLSDILRVNTEITKAPLSASMIKRYDEHHQDLTLLKALVRQQLPEKYKEIFFDQSKNGYAGYIDGGASQEEFYKFIKPILEKMDGTEELLVKLNREDLLRKQRTFDNGSIPHQIHLGELHAILRRQEDFYPFLKDNREKIEKILTFRIPYYVGPLARGNSRFAWMTRKSEETITPWNFEEVVDKGASAQSFIERMTNFDKNLPNEKVLPKHSLLYEYFTVYNELTKVKYVTEGMRKPAFLSGEQKKAIVDLLFKTNRKVTVKQLKEDYFKKIECFDSVEISGVEDRFNASLGTYHDLLKIIKDKDFLDNEENEDILEDIVLTLTLFEDREMIEERLKTYAHLFDDKVMKQLKRRRYTGWGRLSRKLINGIRDKQSGKTILDFLKSDGFANRNFMQLIHDDSLTFKEDIQKAQVSGQGDSLHEHIANLAGSPAIKKGILQTVKVVDELVKVMGRHKPENIVIEMARENQTTQKGQKNSRERMKRIEEGIKELGSQILKEHPVENTQLQNEKLYLYYLQNGRDMYVDQELDINRLSDYDVDHIVPQSFLKDDSIDNKVLTRSDKARGKSDNVPSEEVVKKMKNYWRQLLNAKLITQRKFDNLTKAERGGLSELDKAGFIKRQLVETRQITKHVAQILDSRMNTKYDENDKLIREVKVITLKSKLVSDFRKDFQFYKVREINNYHHAHDAYLNAVVGTALIKKYPKLESEFVYGDYKVYDVRKMIAKSEQEIGKATAKYFFYSNIMNFFKTEITLANGEIRKRPLIETNGETGEIVWDKGRDFATVRKVLSMPQVNIVKKTEVQTGGFSKESILPKRNSDKLIARKKDWDPKKYGGFDSPTVAYSVLVVAKVEKGKSKKLKSVKELLGITIMERSSFEKNPIDFLEAKGYKEVKKDLIIKLPKYSLFELENGRKRMLASAGELQKGNELALPSKYVNFLYLASHYEKLKGSPEDNEQKQLFVEQHKHYLDEIIEQISEFSKRVILADANLDKVLSAYNKHRDKPIREQAENIIHLFTLTNLGAPAAFKYFDTTIDRKRYTSTKEVLDATLIHQSITGLYETRIDLSQLGGDGGPAPGGSGSSGGTLNIEDEHRLHETSKEPDVSLGSTWLSDFPQAWAETGGMGLAVRQAPLIIPLKATSTPVSIKQYPMSQEARLGIKPHIQRLLDQGILVPCQSPWNTPLLPVKKPGTNDYRPVQDLREVNKRVEDIHPTVPNPYNLLSGLPPSHQWYTVLDLKDAFFCLRLHPTSQPLFAFEWRDPEMGISGQLTWTRLPQGFKNSPTLFDEALHRDLADFRIQHPDLILLQYVDDLLLAATSELDCQQGTRALLQTLGNLGYRASAKKAQICQKQVKYLGYLLKEGQRWLTEARKETVMGQPTPKTPRQLREFLGTAGFCRLWIPGFAEMAAPLYPLTKTGTLFNWGPDQQKAYQEIKQALLTAPALGLPDLTKPFELFVDEKQGYAKGVLTQKLGPWRRPVAYLSKKLDPVAAGWPPCLRMVAAIAVLTKDAGKLTMGQPLVILAPHAVEALVKQPPDRWLSNARMTHYQALLLDTDRVQFGPVVALNPATLLPLPEEGLQHNCLDILAEAHGTRPDLTDQPLPDADHTWYTDGSSLLQEGQRKAGAAVTTETEVIWAKALPAGTSAQRAELIALTQALKMAEGKKLNVYTDSRYAFATAHIHGEIYRRRGLLTSEGKEIKNKDEILALLKALFLPKRLSIIHCPGHQKGHSAEARGNRMADQAARKAAITETPDTSTLLAGKRTADGSEFEKRTADGSEFESPKKKAKVE

SEQ ID NO: 7176 - protein, 2094 aa, synthetic construct; identical to SEQ ID NO: 7173

SEQ ID NO: 7177 - protein, 2085 aa, synthetic construct
MPAAKRVKLDGGDKKYSIGLDIGTNSVGWAVITDEYKVPSKKFKVLGNTDRHSIKKNLIGALLFDSGETAEATRLKRTARRRYTRRKNRICYLQEIFSNEMAKVDDSFFHRLEESFLVEEDKKHERHPIFGNIVDEVAYHEKYPTIYHLRKKLVDSTDKADLRLIYLALAHMIKFRGHFLIEGDLNPDNSDVDKLFIQLVQTYNQLFEENPINASGVDAKAILSARLSKSRRLENLIAQLPGEKKNGLFGNLIALSLGLTPNFKSNFDLAEDAKLQLSKDTYDDDLDNLLAQIGDQYADLFLAAKNLSDAILLSDILRVNTEITKAPLSASMIKRYDEHHQDLTLLKALVRQQLPEKYKEIFFDQSKNGYAGYIDGGASQEEFYKFIKPILEKMDGTEELLVKLNREDLLRKQRTFDNGSIPHQIHLGELHAILRRQEDFYPFLKDNREKIEKILTFRIPYYVGPLARGNSRFAWMTRKSEETITPWNFEEVVDKGASAQSFIERMTNFDKNLPNEKVLPKHSLLYEYFTVYNELTKVKYVTEGMRKPAFLSGEQKKAIVDLLFKTNRKVTVKQLKEDYFKKIECFDSVEISGVEDRFNASLGTYHDLLKIIKDKDFLDNEENEDILEDIVLTLTLFEDREMIEERLKTYAHLFDDKVMKQLKRRRYTGWGRLSRKLINGIRDKQSGKTILDFLKSDGFANRNFMQLIHDDSLTFKEDIQKAQVSGQGDSLHEHIANLAGSPAIKKGILQTVKVVDELVKVMGRHKPENIVIEMARENQTTQKGQKNSRERMKRIEEGIKELGSQILKEHPVENTQLQNEKLYLYYLQNGRDMYVDQELDINRLSDYDVDHIVPQSFLKDDSIDNKVLTRSDKARGKSDNVPSEEVVKKMKNYWRQLLNAKLITQRKFDNLTKAERGGLSELDKAGFIKRQLVETRQITKHVAQILDSRMNTKYDENDKLIREVKVITLKSKLVSDFRKDFQFYKVREINNYHHAHDAYLNAVVGTALIKKYPKLESEFVYGDYKVYDVRKMIAKSEQEIGKATAKYFFYSNIMNFFKTEITLANGEIRKRPLIETNGETGEIVWDKGRDFATVRKVLSMPQVNIVKKTEVQTGGFSKESILPKRNSDKLIARKKDWDPKKYGGFDSPTVAYSVLVVAKVEKGKSKKLKSVKELLGITIMERSSFEKNPIDFLEAKGYKEVKKDLIIKLPKYSLFELENGRKRMLASAGELQKGNELALPSKYVNFLYLASHYEKLKGSPEDNEQKQLFVEQHKHYLDEIIEQISEFSKRVILADANLDKVLSAYNKHRDKPIREQAENIIHLFTLTNLGAPAAFKYFDTTIDRKRYTSTKEVLDATLIHQSITGLYETRIDLSQLGGDGGPAPGGSGSSGGIPWLMKKPLQLTTLVPLQEYEERLLKQTMLTGSYKEKLQSLFLKYDALWQHWENQVGHRRIKPHHIATGTVNPRPQKQYPINPKAKASIQTVINDLLKQGVLIQQNSIMNTPVYPVPKPDGKWRMVLDYREVNKTIPLIAAQNQHSAGILSSIFRGKYKTTLDLSNGFWAHSITPESYWLTAFTWLGQQYCWTRLPQGFLNSPALFNADVVDLLKEVPNVQVYVDDIYISHDDPREHLEQLEKVFSLLLNAGYVVSLKKSEIAQHEVEFLGFNITKEGRGLTETFKQKLLNITPPRDLKQLQSILGKLNFARNFIPNFSELVKPLYNIIATAPGKYITWTTDNSQQLQNIISMLNSAENLEERNPEVRLIMKVNTSPSAGYIRFYNEFAKRPIMYLNYVYTKAEVKFTNTEKLLTTIHKGLIKALDLGMGQEILVYSPIVSMTKIQKTPLPERKALPIRWITWMSYLEDPRIQFHYDKTLPELQQVPTVTDDIIAKIKHPSEFSMVFYTDGSAIKHPNVNKSHNAGMGIAQVQFKPEFTVINTWSIPLGDHTAQLAEVAAVEFACKKALKIDGPVLIVTDSFYVAESVNKELPYWQSNGFFNNKKKPLKHVSKWKSIADCIQLKPDIIIIHEKGHQPTASTFHTEGNNLADKLATQGSYVVNAGKRTADGSEFEKRTADGSEFESPKKKAKVE

SEQ ID NO: 7178 - protein, 2092 aa, synthetic construct
MPAAKRVKLDGGDKKYSIGLDIGTNSVGWAVITDEYKVPSKKFKVLGNTDRHSIKKNLIGALLFDSGETAEATRLKRTARRRYTRRKNRICYLQEIFSNEMAKVDDSFFHRLEESFLVEEDKKHERHPIFGNIVDEVAYHEKYPTIYHLRKKLVDSTDKADLRLIYLALAHMIKFRGHFLIEGDLNPDNSDVDKLFIQLVQTYNQLFEENPINASGVDAKAILSARLSKSRRLENLIAQLPGEKKNGLFGNLIALSLGLTPNFKSNFDLAEDAKLQLSKDTYDDDLDNLLAQIGDQYADLFLAAKNLSDAILLSDILRVNTEITKAPLSASMIKRYDEHHQDLTLLKALVRQQLPEKYKEIFFDQSKNGYAGYIDGGASQEEFYKFIKPILEKMDGTEELLVKLNREDLLRKQRTFDNGSIPHQIHLGELHAILRRQEDFYPFLKDNREKIEKILTFRIPYYVGPLARGNSRFAWMTRKSEETITPWNFEEVVDKGASAQSFIERMTNFDKNLPNEKVLPKHSLLYEYFTVYNELTKVKYVTEGMRKPAFLSGEQKKAIVDLLFKTNRKVTVKQLKEDYFKKIECFDSVEISGVEDRFNASLGTYHDLLKIIKDKDFLDNEENEDILEDIVLTLTLFEDREMIEERLKTYAHLFDDKVMKQLKRRRYTGWGRLSRKLINGIRDKQSGKTILDFLKSDGFANRNFMQLIHDDSLTFKEDIQKAQVSGQGDSLHEHIANLAGSPAIKKGILQTVKVVDELVKVMGRHKPENIVIEMARENQTTQKGQKNSRERMKRIEEGIKELGSQILKEHPVENTQLQNEKLYLYYLQNGRDMYVDQELDINRLSDYDVDHIVPQSFLKDDSIDNKVLTRSDKARGKSDNVPSEEVVKKMKNYWRQLLNAKLITQRKFDNLTKAERGGLSELDKAGFIKRQLVETRQITKHVAQILDSRMNTKYDENDKLIREVKVITLKSKLVSDFRKDFQFYKVREINNYHHAHDAYLNAVVGTALIKKYPKLESEFVYGDYKVYDVRKMIAKSEQEIGKATAKYFFYSNIMNFFKTEITLANGEIRKRPLIETNGETGEIVWDKGRDFATVRKVLSMPQVNIVKKTEVQTGGFSKESILPKRNSDKLIARKKDWDPKKYGGFDSPTVAYSVLVVAKVEKGKSKKLKSVKELLGITIMERSSFEKNPIDFLEAKGYKEVKKDLIIKLPKYSLFELENGRKRMLASAGELQKGNELALPSKYVNFLYLASHYEKLKGSPEDNEQKQLFVEQHKHYLDEIIEQISEFSKRVILADANLDKVLSAYNKHRDKPIREQAENIIHLFTLTNLGAPAAFKYFDTTIDRKRYTSTKEVLDATLIHQSITGLYETRIDLSQLGGDGGPAPGGSGSSGGVLNLEEEYRLHEKPVPSSIDPSWLQLFPTVWAERAGMGLANQVPPVVVELRSGASPVAVRQYPMSKEAREGIRPHIQRFLDLGVLVPCQSPWNTPLLPVKKPGTNDYRPVQDLREINKRVQDIHPTVPNPYNLLSSLPPSHTWYSVLDLKDAFFCLKLHPNSQPLFAFEWRDPEKGNTGQLTWTRLPQGFKNSPTLFNEALHRDLAPFRALNPQVVLLQYVDDLLVAAPTYRDCKEGTQKLLQELSKLGYRVSAKKAQLCQKEVTYLGYLLKEGKRWLTPARKATVMKIPPPTTPRQVREFLGTAGFCRLWIPGFASLAAPLYPLTKPSIPFIWTEEHQKAFDRIKEALLSAPALALPDLTKPFTLYVDERAGVARGVLTQTLGPWRRPVAYLSKKLDPVASGWPTCLKAVAAVALLLKDADKLTLGQNVTVIASHSLESIVRQPPDRWMTNARMTHYQSLLLNERVSFAPPAVLNPATLLPVESEATPVHRCSEILAEETGTRRDLKDQPLPGVPAWYTDGSSFIAEGKRRAGAAIVDGKRTVWASSLPEGTSAQKAELVALTQALRLAEGKDINIYTDSRYAFATAHIHGAIYKQRGWLTSAGKDIKNKEEILALLEAIHLPKRVAIIHCPGHQKGNDPVATGNRRADEAAKQAALSTRVLAETTKPAGKRTADGSEFEKRTADGSEFESPKKKAKVE

SEQ ID NO: 7179 - protein, 2094 aa, synthetic construct
MPAAKRVKLDGGDKKYSIGLDIGTNSVGWAVITDEYKVPSKKFKVLGNTDRHSIKKNLIGALLFDSGETAEATRLKRTARRRYTRRKNRICYLQEIFSNEMAKVDDSFFHRLEESFLVEEDKKHERHPIFGNIVDEVAYHEKYPTIYHLRKKLVDSTDKADLRLIYLALAHMIKFRGHFLIEGDLNPDNSDVDKLFIQLVQTYNQLFEENPINASGVDAKAILSARLSKSRRLENLIAQLPGEKKNGLFGNLIALSLGLTPNFKSNFDLAEDAKLQLSKDTYDDDLDNLLAQIGDQYADLFLAAKNLSDAILLSDILRVNTEITKAPLSASMIKRYDEHHQDLTLLKALVRQQLPEKYKEIFFDQSKNGYAGYIDGGASQEEFYKFIKPILEKMDGTEELLVKLNREDLLRKQRTFDNGSIPHQIHLGELHAILRRQEDFYPFLKDNREKIEKILTFRIPYYVGPLARGNSRFAWMTRKSEETITPWNFEEVVDKGASAQSFIERMTNFDKNLPNEKVLPKHSLLYEYFTVYNELTKVKYVTEGMRKPAFLSGEQKKAIVDLLFKTNRKVTVKQLKEDYFKKIECFDSVEISGVEDRFNASLGTYHDLLKIIKDKDFLDNEENEDILEDIVLTLTLFEDREMIEERLKTYAHLFDDKVMKQLKRRRYTGWGRLSRKLINGIRDKQSGKTILDFLKSDGFANRNFMQLIHDDSLTFKEDIQKAQVSGQGDSLHEHIANLAGSPAIKKGILQTVKVVDELVKVMGRHKPENIVIEMARENQTTQKGQKNSRERMKRIEEGIKELGSQILKEHPVENTQLQNEKLYLYYLQNGRDMYVDQELDINRLSDYDVDHIVPQSFLKDDSIDNKVLTRSDKARGKSDNVPSEEVVKKMKNYWRQLLNAKLITQRKFDNLTKAERGGLSELDKAGFIKRQLVETRQITKHVAQILDSRMNTKYDENDKLIREVKVITLKSKLVSDFRKDFQFYKVREINNYHHAHDAYLNAVVGTALIKKYPKLESEFVYGDYKVYDVRKMIAKSEQEIGKATAKYFFYSNIMNFFKTEITLANGEIRKRPLIETNGETGEIVWDKGRDFATVRKVLSMPQVNIVKKTEVQTGGFSKESILPKRNSDKLIARKKDWDPKKYGGFDSPTVAYSVLVVAKVEKGKSKKLKSVKELLGITIMERSSFEKNPIDFLEAKGYKEVKKDLIIKLPKYSLFELENGRKRMLASAGELQKGNELALPSKYVNFLYLASHYEKLKGSPEDNEQKQLFVEQHKHYLDEIIEQISEFSKRVILADANLDKVLSAYNKHRDKPIREQAENIIHLFTLTNLGAPAAFKYFDTTIDRKRYTSTKEVLDATLIHQSITGLYETRIDLSQLGGDGGPAPGGSGSSGGTLNIEDEYRLHETSKEPDVPLGSTWLSDFPQAWAETGGMGLAVRQAPLIIPLKATSTPVSIKQYPMSQEARLGIKPHIQRLLDQGILVPCQSPWNTPLLPVKKPGTNDYRPVQDLREVNKRVEDIHPTVPNPYNLLSGLPPSHQWYTVLDLKDAFFCLRLHPTSQPLFAFEWRDPEMGISGQLTWTRLPQGFKNSPTLFNEALHRDLADFRIQHPDLILLQYVDDLLLAATSEQDCQRGTRALLQTLGNLGYRASAKKAQICQKQVKYLGYLLKEGQRWLTEARKETVMGQPTPKTPRQLREFLGTAGFCRLWIPGFAEMAAPLYPLTKPGTLFNWGPDQQKAYQEIKQALLTAPALGLPDLTKPFELFVDEKQGYAKGVLTQKLGPWRRPVAYLSKKLDPVAAGWPPCLRMVAAIAVLTKDAGKLTMGQPLVILAPHAVEALVKQPPDRWLSNARMTHYQAMLLDTDRVQFGPVVALNPATLLPLPEKEAPHDCLEILAETHGTRPDLTDQPIPDADYTWYTDGSSFLQEGQRRAGAAVTTETEVIWARALPAGTSAQRAELIALTQALKMAEGKKLNVYTDSRYAFATAHVHGEIYRRRGWLTSEGREIKNKNEILALLKALFLPKRLSIIHCPGHQKGNSAEARGNRMADQAAREAAMKAVLETSTLLAGKRTADGSEFEKRTADGSEFESPKKKAKVE

SEQ ID NO: 7180 - protein, 2094 aa, synthetic construct
MPAAKRVKLDGGDKKYSIGLDIGTNSVGWAVITDEYKVPSKKFKVLGNTDRHSIKKNLIGALLFDSGETAEATRLKRTARRRYTRRKNRICYLQEIFSNEMAKVDDSFFHRLEESFLVEEDKKHERHPIFGNIVDEVAYHEKYPTIYHLRKKLVDSTDKADLRLIYLALAHMIKFRGHFLIEGDLNPDNSDVDKLFIQLVQTYNQLFEENPINASGVDAKAILSARLSKSRRLENLIAQLPGEKKNGLFGNLIALSLGLTPNFKSNFDLAEDAKLQLSKDTYDDDLDNLLAQIGDQYADLFLAAKNLSDAILLSDILRVNTEITKAPLSASMIKRYDEHHQDLTLLKALVRQQLPEKYKEIFFDQSKNGYAGYIDGGASQEEFYKFIKPILEKMDGTEELLVKLNREDLLRKQRTFDNGSIPHQIHLGELHAILRRQEDFYPFLKDNREKIEKILTFRIPYYVGPLARGNSRFAWMTRKSEETITPWNFEEVVDKGASAQSFIERMTNFDKNLPNEKVLPKHSLLYEYFTVYNELTKVKYVTEGMRKPAFLSGEQKKAIVDLLFKTNRKVTVKQLKEDYFKKIECFDSVEISGVEDRFNASLGTYHDLLKIIKDKDFLDNEENEDILEDIVLTLTLFEDREMIEERLKTYAHLFDDKVMKQLKRRRYTGWGRLSRKLINGIRDKQSGKTILDFLKSDGFANRNFMQLIHDDSLTFKEDIQKAQVSGQGDSLHEHIANLAGSPAIKKGILQTVKVVDELVKVMGRHKPENIVIEMARENQTTQKGQKNSRERMKRIEEGIKELGSQILKEHPVENTQLQNEKLYLYYLQNGRDMYVDQELDINRLSDYDVDHIVPQSFLKDDSIDNKVLTRSDKARGKSDNVPSEEVVKKMKNYWRQLLNAKLITQRKFDNLTKAERGGLSELDKAGFIKRQLVETRQITKHVAQILDSRMNTKYDENDKLIREVKVITLKSKLVSDFRKDFQFYKVREINNYHHAHDAYLNAVVGTALIKKYPKLESEFVYGDYKVYDVRKMIAKSEQEIGKATAKYFFYSNIMNFFKTEITLANGEIRKRPLIETNGETGEIVWDKGRDFATVRKVLSMPQVNIVKKTEVQTGGFSKESILPKRNSDKLIARKKDWDPKKYGGFDSPTVAYSVLVVAKVEKGKSKKLKSVKELLGITIMERSSFEKNPIDFLEAKGYKEVKKDLIIKLPKYSLFELENGRKRMLASAGELQKGNELALPSKYVNFLYLASHYEKLKGSPEDNEQKQLFVEQHKHYLDEIIEQISEFSKRVILADANLDKVLSAYNKHRDKPIREQAENIIHLFTLTNLGAPAAFKYFDTTIDRKRYTSTKEVLDATLIHQSITGLYETRIDLSQLGGDGGPAPGGSGSSGGTLNIEDEYRLHETSKEPDVPLGSTWLSDFPQAWAETGGMGLAVRQAPLIIPLKATSTPVSIKQYPMSQEARLGIKPHIQRLLDQGILVPCQSPWNTPLLPVKKPGTNDYRPVQDLREVNKRVEDIHPTVPNPYNLLSGLPPSHQWYTVLDLKDAFFCLRLHPTSQPLFAFEWRDPEMGISGQLTWTRLPQGFKNSPTLFNEALHRDLADFRIQHPDLILLQYVDDLLLAATSEQDCQRGTRALLQTLGNLGYRASAKKAQICQKQVKYLGYLLKEGQRWLTEARKETVMGQPTPKTPRQLREFLGKAGFCRLFIPGFAEMAAPLYPLTKPGTLFNWGPDQQKAYQEIKQALLTAPALGLPDLTKPFELFVDEKQGYAKGVLTQKLGPWRRPVAYLSKKLDPVAAGWPPCLRMVAAIAVLTKDAGKLTMGQPLVILAPHAVEALVKQPPDRWLSNARMTHYQAMLLDTDRVQFGPVVALNPATLLPLPEKEAPHDCLEILAETHGTRPDLTDQPIPDADYTWYTDGSSFLQEGQRRAGAAVTTETEVIWARALPAGTSAQRAELIALTQALKMAEGKKLNVYTDSRYAFATAHVHGEIYRRRGWLTSEGREIKNKNEILALLKALFLPKRLSIIHCPGHQKGNSAEARGNRMADQAAREAAMKAVLETSTLLAGKRTADGSEFEKRTADGSEFESPKKKAKVE

SEQ ID NO: 7181 - protein, 2096 aa, synthetic construct
MPAAKRVKLDGGDKKYSIGLDIGTNSVGWAVITDEYKVPSKKFKVLGNTDRHSIKKNLIGALLFDSGETAEATRLKRTARRRYTRRKNRICYLQEIFSNEMAKVDDSFFHRLEESFLVEEDKKHERHPIFGNIVDEVAYHEKYPTIYHLRKKLVDSTDKADLRLIYLALAHMIKFRGHFLIEGDLNPDNSDVDKLFIQLVQTYNQLFEENPINASGVDAKAILSARLSKSRRLENLIAQLPGEKKNGLFGNLIALSLGLTPNFKSNFDLAEDAKLQLSKDTYDDDLDNLLAQIGDQYADLFLAAKNLSDAILLSDILRVNTEITKAPLSASMIKRYDEHHQDLTLLKALVRQQLPEKYKEIFFDQSKNGYAGYIDGGASQEEFYKFIKPILEKMDGTEELLVKLNREDLLRKQRTFDNGSIPHQIHLGELHAILRRQEDFYPFLKDNREKIEKILTFRIPYYVGPLARGNSRFAWMTRKSEETITPWNFEEVVDKGASAQSFIERMTNFDKNLPNEKVLPKHSLLYEYFTVYNELTKVKYVTEGMRKPAFLSGEQKKAIVDLLFKTNRKVTVKQLKEDYFKKIECFDSVEISGVEDRFNASLGTYHDLLKIIKDKDFLDNEENEDILEDIVLTLTLFEDREMIEERLKTYAHLFDDKVMKQLKRRRYTGWGRLSRKLINGIRDKQSGKTILDFLKSDGFANRNFMQLIHDDSLTFKEDIQKAQVSGQGDSLHEHIANLAGSPAIKKGILQTVKVVDELVKVMGRHKPENIVIEMARENQTTQKGQKNSRERMKRIEEGIKELGSQILKEHPVENTQLQNEKLYLYYLQNGRDMYVDQELDINRLSDYDVDHIVPQSFLKDDSIDNKVLTRSDKARGKSDNVPSEEVVKKMKNYWRQLLNAKLITQRKFDNLTKAERGGLSELDKAGFIKRQLVETRQITKHVAQILDSRMNTKYDENDKLIREVKVITLKSKLVSDFRKDFQFYKVREINNYHHAHDAYLNAVVGTALIKKYPKLESEFVYGDYKVYDVRKMIAKSEQEIGKATAKYFFYSNIMNFFKTEITLANGEIRKRPLIETNGETGEIVWDKGRDFATVRKVLSMPQVNIVKKTEVQTGGFSKESILPKRNSDKLIARKKDWDPKKYGGFDSPTVAYSVLVVAKVEKGKSKKLKSVKELLGITIMERSSFEKNPIDFLEAKGYKEVKKDLIIKLPKYSLFELENGRKRMLASAGELQKGNELALPSKYVNFLYLASHYEKLKGSPEDNEQKQLFVEQHKHYLDEIIEQISEFSKRVILADANLDKVLSAYNKHRDKPIREQAENIIHLFTLTNLGAPAAFKYFDTTIDRKRYTSTKEVLDATLIHQSITGLYETRIDLSQLGGDGGPAPGSSGGSGGTAPLEEEYRLFLEAPIQNVTLLEQWKREIPKVWAEINPPGLASTQAPIHVQLLSTALPVRVRQYPITLEAKRSLRETIRKFRAAGILRPVHSPWNTPLLPVRKSGTSEYRMVQDLREVNKRVETIHPTVPNPYTLLSLLPPDRIWYSVLDLKDAFFCIPLAPESQLIFAFEWADAEEGESGQLTWTRLPQGFKNSPTLFNEALNRDLQGFRLDHPSVSLLQYVDDLLIAADTQAACLSATRDLLMTLAELGYRVSGKKAQLCQEEVTYLGFKIHKGSRSLSNSRTQAILQIPVPKTKRQVREFLGTIGYCRLWIPGFAELAQPLYAATRPGNDPLVWGEKEEEAFQSLKLALTQPPALALPSLDKPFQLFVEETSGAAKGVLTQALGPWKRPVAYLSKRLDPVAAGWPRCLRAIAAAALLTREASKLTFGQDIEITSSHNLESLLRSPPDKWLTNARITQYQVLLLDPPRVRFKQTAALNPATLLPETDDTLPIHHCLDTLDSLTSTRPDLTDQPLAQAEATLFTDGSSYIRDGKRYAGAAVVTLDSVIWAEPLPIGTSAQKAELIALTKALEWSKDKSVNIYTDSRYAFATLHVHGMIYRERGWLTAGGKAIKNAPEILALLTAVWLPKRVAVMHCKGHQKDDAPTSTGNRRADEVAREVAIRPLSTQATISAGKRTADGSEFEKRTADGSEFESPKKKAKVE

SEQ ID NO: 7182 - protein, 2093 aa, synthetic construct
MPAAKRVKLDGGDKKYSIGLDIGTNSVGWAVITDEYKVPSKKFKVLGNTDRHSIKKNLIGALLFDSGETAEATRLKRTARRRYTRRKNRICYLQEIFSNEMAKVDDSFFHRLEESFLVEEDKKHERHPIFGNIVDEVAYHEKYPTIYHLRKKLVDSTDKADLRLIYLALAHMIKFRGHFLIEGDLNPDNSDVDKLFIQLVQTYNQLFEENPINASGVDAKAILSARLSKSRRLENLIAQLPGEKKNGLFGNLIALSLGLTPNFKSNFDLAEDAKLQLSKDTYDDDLDNLLAQIGDQYADLFLAAKNLSDAILLSDILRVNTEITKAPLSASMIKRYDEHHQDLTLLKALVRQQLPEKYKEIFFDQSKNGYAGYIDGGASQEEFYKFIKPILEKMDGTEELLVKLNREDLLRKQRTFDNGSIPHQIHLGELHAILRRQEDFYPFLKDNREKIEKILTFRIPYYVGPLARGNSRFAWMTRKSEETITPWNFEEVVDKGASAQSFIERMTNFDKNLPNEKVLPKHSLLYEYFTVYNELTKVKYVTEGMRKPAFLSGEQKKAIVDLLFKTNRKVTVKQLKEDYFKKIECFDSVEISGVEDRFNASLGTYHDLLKIIKDKDFLDNEENEDILEDIVLTLTLFEDREMIEERLKTYAHLFDDKVMKQLKRRRYTGWGRLSRKLINGIRDKQSGKTILDFLKSDGFANRNFMQLIHDDSLTFKEDIQKAQVSGQGDSLHEHIANLAGSPAIKKGILQTVKVVDELVKVMGRHKPENIVIEMARENQTTQKGQKNSRERMKRIEEGIKELGSQILKEHPVENTQLQNEKLYLYYLQNGRDMYVDQELDINRLSDYDVDHIVPQSFLKDDSIDNKVLTRSDKARGKSDNVPSEEVVKKMKNYWRQLLNAKLITQRKFDNLTKAERGGLSELDKAGFIKRQLVETRQITKHVAQILDSRMNTKYDENDKLIREVKVITLKSKLVSDFRKDFQFYKVREINNYHHAHDAYLNAVVGTALIKKYPKLESEFVYGDYKVYDVRKMIAKSEQEIGKATAKYFFYSNIMNFFKTEITLANGEIRKRPLIETNGETGEIVWDKGRDFATVRKVLSMPQVNIVKKTEVQTGGFSKESILPKRNSDKLIARKKDWDPKKYGGFDSPTVAYSVLVVAKVEKGKSKKLKSVKELLGITIMERSSFEKNPIDFLEAKGYKEVKKDLIIKLPKYSLFELENGRKRMLASAGELQKGNELALPSKYVNFLYLASHYEKLKGSPEDNEQKQLFVEQHKHYLDEIIEQISEFSKRVILADANLDKVLSAYNKHRDKPIREQAENIIHLFTLTNLGAPAAFKYFDTTIDRKRYTSTKEVLDATLIHQSITGLYETRIDLSQLGGDGGPAPGSSGGSGGTLQLEEEYRLFEPESTQKQEMDIWLKNFPQAWAETGGMGTAHCQAPVLIQLKATATPISIRQYPMPHEAYQGIKPHIRRMLDQGILKPCQSPWNTPLLPVKKPGTEDYRPVQDLREVNKRVEDIHPTVPNPYNLLSTLPPSHPWYTVLDLKDAFFCLRLHSESQLLFAFEWRDPEIGLSGQLTWTRLPQGFKNSPTLFNEALHSDLADFRVRYPALVLLQYVDDLLLAAATRTECLEGTKALLETLGNKGYRASAKKAQICLQEVTYLGYSLKDGQRWLTKARKEAILSIPVPKNSRQVREFLGTAGYCRLWIPGFAELAAPLYPLTRPGTLFQWGTEQQLAFEDIKKALLSSPALGLPDITKPFELFIDENSGFAKGVLVQKLGPWKRPVAYLSKKLDTVASGWPPCLRMVAAIAILVKDAGKLTLGQPLTILTSHPVEALVRQPPNKWLSNARMTHYQAMLLDAERVHFGPTVSLNPATLLPLPSGGNHHDCLQILAETHGTRPDLTDQPLPDADLTWYTDGSSFIRNGEREAGAAVTTESEVIWAAPLPPGTSAQRAELIALTQALKMAEGKKLTVYTDSRYAFATTHVHGEIYRRRGWLTSEGKEIKNKNEILALLEALFLPKRLSIIHCPGHQKGDSPQAKGNRLADDTAKKAATETHSSLTVLPAGKRTADGSEFEKRTADGSEFESPKKKAKVE

SEQ ID NO: 7183 - protein, 2216 aa, synthetic construct
MPAAKRVKLDGGDKKYSIGLDIGTNSVGWAVITDEYKVPSKKFKVLGNTDRHSIKKNLIGALLFDSGETAEATRLKRTARRRYTRRKNRICYLQEIFSNEMAKVDDSFFHRLEESFLVEEDKKHERHPIFGNIVDEVAYHEKYPTIYHLRKKLVDSTDKADLRLIYLALAHMIKFRGHFLIEGDLNPDNSDVDKLFIQLVQTYNQLFEENPINASGVDAKAILSARLSKSRRLENLIAQLPGEKKNGLFGNLIALSLGLTPNFKSNFDLAEDAKLQLSKDTYDDDLDNLLAQIGDQYADLFLAAKNLSDAILLSDILRVNTEITKAPLSASMIKRYDEHHQDLTLLKALVRQQLPEKYKEIFFDQSKNGYAGYIDGGASQEEFYKFIKPILEKMDGTEELLVKLNREDLLRKQRTFDNGSIPHQIHLGELHAILRRQEDFYPFLKDNREKIEKILTFRIPYYVGPLARGNSRFAWMTRKSEETITPWNFEEVVDKGASAQSFIERMTNFDKNLPNEKVLPKHSLLYEYFTVYNELTKVKYVTEGMRKPAFLSGEQKKAIVDLLFKTNRKVTVKQLKEDYFKKIECFDSVEISGVEDRFNASLGTYHDLLKIIKDKDFLDNEENEDILEDIVLTLTLFEDREMIEERLKTYAHLFDDKVMKQLKRRRYTGWGRLSRKLINGIRDKQSGKTILDFLKSDGFANRNFMQLIHDDSLTFKEDIQKAQVSGQGDSLHEHIANLAGSPAIKKGILQTVKVVDELVKVMGRHKPENIVIEMARENQTTQKGQKNSRERMKRIEEGIKELGSQILKEHPVENTQLQNEKLYLYYLQNGRDMYVDQELDINRLSDYDVDHIVPQSFLKDDSIDNKVLTRSDKARGKSDNVPSEEVVKKMKNYWRQLLNAKLITQRKFDNLTKAERGGLSELDKAGFIKRQLVETRQITKHVAQILDSRMNTKYDENDKLIREVKVITLKSKLVSDFRKDFQFYKVREINNYHHAHDAYLNAVVGTALIKKYPKLESEFVYGDYKVYDVRKMIAKSEQEIGKATAKYFFYSNIMNFFKTEITLANGEIRKRPLIETNGETGEIVWDKGRDFATVRKVLSMPQVNIVKKTEVQTGGFSKESILPKRNSDKLIARKKDWDPKKYGGFDSPTVAYSVLVVAKVEKGKSKKLKSVKELLGITIMERSSFEKNPIDFLEAKGYKEVKKDLIIKLPKYSLFELENGRKRMLASAGELQKGNELALPSKYVNFLYLASHYEKLKGSPEDNEQKQLFVEQHKHYLDEIIEQISEFSKRVILADANLDKVLSAYNKHRDKPIREQAENIIHLFTLTNLGAPAAFKYFDTTIDRKRYTSTKEVLDATLIHQSITGLYETRIDLSQLGGDGGPAPGSSGGSGGTLGDQGSRGSDPLPEPRVTLTVEGIPTEFLVNTGAEHSVLTKPMGKMGSKRTVVAGATGSKVYPWTTKRLLKIGQKQVTHSFLVIPECPAPLLGRDLLTKLKAQIQFSTEGPQVTWEDRPAMCLVLNLEEEYRLHEKPVPPSIDPSWLQLFPMVWAEKAGMGLANQVPPVVVELKSDASPVAVRQYPMSKEAREGIRPHIQRFLDLGILVPCQSPWNTPLLPVKKPGTNDYRPVQDLREVNKRVQDIHPTVPNPYNLLSSLPPSHTWYSVLDLKDAFFCLKLHPNSQPLFAFEWRDPEKGNTGQLTWTRLPQGFKNSPTLFDEALHRDLASFRALNPQVVMLQYVDDLLVAAPTYRDCKEGTRRLLQELSKLGYRVSAKKAQLCREEVTYLGYLLKGGKRWLTPARKATVMKIPTPTTPRQVREFLGTAGFCRLWIPGFASLAAPLYPLTREKVPFTWTEAHQEAFGRIKEALLSAPALALPDLTKPFALYVDEKEGVARGVLTQTLGPWRRPVAYLSKKLDPVASGWPTCLKAIAAVALLLKDADKLTLGQNVLVIAPHNLESIVRQPPDRWMTNARMTHYQSLLLNERVSFAPPAILNPATLLPVESDDTPIHICSEILAEETGTRPDLRDQPLPGVPAWYTDGSSFIMDGRRQAGAAIVDNKRTVWASNLPEGTSAQKAELIALTQALRLAEGKSINIYTDSRYAFATAHVHGAIYKQRGLLTSAGKDIKNKEEILALLEAIHLPKRVAIIHCPGHQRGTDPVATGNRKADEAAKQAAQSTRILTETTKNAGKRTADGSEFEKRTADGSEFESPKKKAKVE

SEQ ID NO: 7184 - protein, 2216 aa, synthetic construct
MPAAKRVKLDGGDKKYSIGLDIGTNSVGWAVITDEYKVPSKKFKVLGNTDRHSIKKNLIGALLFDSGETAEATRLKRTARRRYTRRKNRICYLQEIFSNEMAKVDDSFFHRLEESFLVEEDKKHERHPIFGNIVDEVAYHEKYPTIYHLRKKLVDSTDKADLRLIYLALAHMIKFRGHFLIEGDLNPDNSDVDKLFIQLVQTYNQLFEENPINASGVDAKAILSARLSKSRRLENLIAQLPGEKKNGLFGNLIALSLGLTPNFKSNFDLAEDAKLQLSKDTYDDDLDNLLAQIGDQYADLFLAAKNLSDAILLSDILRVNTEITKAPLSASMIKRYDEHHQDLTLLKALVRQQLPEKYKEIFFDQSKNGYAGYIDGGASQEEFYKFIKPILEKMDGTEELLVKLNREDLLRKQRTFDNGSIPHQIHLGELHAILRRQEDFYPFLKDNREKIEKILTFRIPYYVGPLARGNSRFAWMTRKSEETITPWNFEEVVDKGASAQSFIERMTNFDKNLPNEKVLPKHSLLYEYFTVYNELTKVKYVTEGMRKPAFLSGEQKKAIVDLLFKTNRKVTVKQLKEDYFKKIECFDSVEISGVEDRFNASLGTYHDLLKIIKDKDFLDNEENEDILEDIVLTLTLFEDREMIEERLKTYAHLFDDKVMKQLKRRRYTGWGRLSRKLINGIRDKQSGKTILDFLKSDGFANRNFMQLIHDDSLTFKEDIQKAQVSGQGDSLHEHIANLAGSPAIKKGILQTVKVVDELVKVMGRHKPENIVIEMARENQTTQKGQKNSRERMKRIEEGIKELGSQILKEHPVENTQLQNEKLYLYYLQNGRDMYVDQELDINRLSDYDVDHIVPQSFLKDDSIDNKVLTRSDKARGKSDNVPSEEVVKKMKNYWRQLLNAKLITQRKFDNLTKAERGGLSELDKAGFIKRQLVETRQITKHVAQILDSRMNTKYDENDKLIREVKVITLKSKLVSDFRKDFQFYKVREINNYHHAHDAYLNAVVGTALIKKYPKLESEFVYGDYKVYDVRKMIAKSEQEIGKATAKYFFYSNIMNFFKTEITLANGEIRKRPLIETNGETGEIVWDKGRDFATVRKVLSMPQVNIVKKTEVQTGGFSKESILPKRNSDKLIARKKDWDPKKYGGFDSPTVAYSVLVVAKVEKGKSKKLKSVKELLGITIMERSSFEKNPIDFLEAKGYKEVKKDLIIKLPKYSLFELENGRKRMLASAGELQKGNELALPSKYVNFLYLASHYEKLKGSPEDNEQKQLFVEQHKHYLDEIIEQISEFSKRVILADANLDKVLSAYNKHRDKPIREQAENIIHLFTLTNLGAPAAFKYFDTTIDRKRYTSTKEVLDATLIHQSITGLYETRIDLSQLGGDGGPAPGSSGGSGGTLGDQGSRGSDPLPEPRVTLTVEGIPTEFLVNTGAEHSVLTKPMGKMGSKRTVVAGATGSKVYPWTTKRLLKIGQKQVTHSFLVIPECPAPLLGRDLLTKLKAQIQFSTEGPQVTWEDRPAMCLVLNLEEEYRLHEKPVPPSIDPSWLQLFPMVWAEKAGMGLANQVPPVVVELKSDASPVAVRQYPMSKEAREGIRPHIQRFLDLGILVPCQSPWNTPLLPVKKPGTNDYRPVQDLREVNKRVQDIHPTVPNPYNLLSSLPPSHTWYSVLDLKDAFFCLKLHPNSQPLFAFEWRDPEKGNTGQLTWTRLPQGFKNSPTLFNEALHRDLASFRALNPQVVMLQYVDDLLVAAPTYRDCKEGTRRLLQELSKLGYRVSAKKAQLCREEVTYLGYLLKGGKRWLTPARKATVMKIPTPTTPRQVREFLGKAGFCRLFIPGFASLAAPLYPLTRPKVPFTWTEAHQEAFGRIKEALLSAPALALPDLTKPFALYVDEKEGVARGVLTQTLGPWRRPVAYLSKKLDPVASGWPTCLKAIAAVALLLKDADKLTLGQNVLVIAPHNLESIVRQPPDRWMTNARMTHYQSLLLNERVSFAPPAILNPATLLPVESDDTPIHICSEILAEETGTRPDLRDQPLPGVPAWYTDGSSFIMDGRRQAGAAIVDNKRTVWASNLPEGTSAQKAELIALTQALRLAEGKSINIYTDSRYAFATAHVHGAIYKQRGWLTSAGKDIKNKEEILALLEAIHLPKRVAIIHCPGHQRGTDPVATGNRKADEAAKQAAQSTRILTETTKNAGKRTADGSEFEKRTADGSEFESPKKKAKVE

SEQ ID NO: 7185 - protein, 2094 aa, synthetic construct
MPAAKRVKLDGGDKKYSIGLDIGTNSVGWAVITDEYKVPSKKFKVLGNTDRHSIKKNLIGALLFDSGETAEATRLKRTARRRYTRRKNRICYLQEIFSNEMAKVDDSFFHRLEESFLVEEDKKHERHPIFGNIVDEVAYHEKYPTIYHLRKKLVDSTDKADLRLIYLALAHMIKFRGHFLIEGDLNPDNSDVDKLFIQLVQTYNQLFEENPINASGVDAKAILSARLSKSRRLENLIAQLPGEKKNGLFGNLIALSLGLTPNFKSNFDLAEDAKLQLSKDTYDDDLDNLLAQIGDQYADLFLAAKNLSDAILLSDILRVNTEITKAPLSASMIKRYDEHHQDLTLLKALVRQQLPEKYKEIFFDQSKNGYAGYIDGGASQEEFYKFIKPILEKMDGTEELLVKLNREDLLRKQRTFDNGSIPHQIHLGELHAILRRQEDFYPFLKDNREKIEKILTFRIPYYVGPLARGNSRFAWMTRKSEETITPWNFEEVVDKGASAQSFIERMTNFDKNLPNEKVLPKHSLLYEYFTVYNELTKVKYVTEGMRKPAFLSGEQKKAIVDLLFKTNRKVTVKQLKEDYFKKIECFDSVEISGVEDRFNASLGTYHDLLKIIKDKDFLDNEENEDILEDIVLTLTLFEDREMIEERLKTYAHLFDDKVMKQLKRRRYTGWGRLSRKLINGIRDKQSGKTILDFLKSDGFANRNFMQLIHDDSLTFKEDIQKAQVSGQGDSLHEHIANLAGSPAIKKGILQTVKVVDELVKVMGRHKPENIVIEMARENQTTQKGQKNSRERMKRIEEGIKELGSQILKEHPVENTQLQNEKLYLYYLQNGRDMYVDQELDINRLSDYDVDHIVPQSFLKDDSIDNKVLTRSDKARGKSDNVPSEEVVKKMKNYWRQLLNAKLITQRKFDNLTKAERGGLSELDKAGFIKRQLVETRQITKHVAQILDSRMNTKYDENDKLIREVKVITLKSKLVSDFRKDFQFYKVREINNYHHAHDAYLNAVVGTALIKKYPKLESEFVYGDYKVYDVRKMIAKSEQEIGKATAKYFFYSNIMNFFKTEITLANGEIRKRPLIETNGETGEIVWDKGRDFATVRKVLSMPQVNIVKKTEVQTGGFSKESILPKRNSDKLIARKKDWDPKKYGGFDSPTVAYSVLVVAKVEKGKSKKLKSVKELLGITIMERSSFEKNPIDFLEAKGYKEVKKDLIIKLPKYSLFELENGRKRMLASAGELQKGNELALPSKYVNFLYLASHYEKLKGSPEDNEQKQLFVEQHKHYLDEIIEQISEFSKRVILADANLDKVLSAYNKHRDKPIREQAENIIHLFTLTNLGAPAAFKYFDTTIDRKRYTSTKEVLDATLIHQSITGLYETRIDLSQLGGDGGPAPGSSGGSGGLGIEDEYRLHETSTEPDVSLGSTWLSDFPQAWAETGGMGLAVRQAPLIIPLKATSTPVSIQQYPMSHEARLGIKPHIQRLLDQGILVPCQSPWNTPLLPVKKPGTNDYRPVQDLREVNKRVEDIHPTVPNPYNLLSGLPPSHQWYTVLDLKDAFFCLRLHPTSQPLFAFEWRDPGMGISGQLTWTRLPQGFKNSPTLFNEALHRDLADFRIQHPDLILLQYVDDILLAATSELDCQQGTRALLQTLGDLGYRASAKKAQICQKQVKYLGYLLREGQRWLTEARKETVMGQPVPKTPRQLREFLGKAGFCRLFIPGFAEMAAPLYPLTKPGTLFSWGPDQQKAYQEIKQALLTAPALGLPDLTKPFELFVDEKQGYAKGVLTQKLGPWRRPVAYLSKKLDPVAAGWPPCLRMVAAIAVLTKDAGKLTMGQPLVILAPHAVEALVKQPPDRWLSNARMTHYQAMLLDTDRVQFGPVVALNPATLLPLPEEGAPHDCLEILAETHGTRPDLTDQPIPDADHTWYTDGSSFLQEGQRKAGAAVTTETEVIWAGALPAGTSAQRAELIALTQALKMAEGKRLNVYTDSRYAFATAHIHGEIYRRRGWLTSEGREIKNKSEILALLKALFLPKRLSIIHCLGHQKGDSAEARGNRLADQAAREAAIKTPPDTSTLLIAGKRTADGSEFEKRTADGSEFESPKKKAKVE

SEQ ID NO: 7186 - protein, 2094 aa, synthetic construct; identical to SEQ ID NO: 7185

SEQ ID NO: 7187 - protein, 2088 aa, synthetic construct
MPAAKRVKLDGGDKKYSIGLDIGTNSVGWAVITDEYKVPSKKFKVLGNTDRHSIKKNLIGALLFDSGETAEATRLKRTARRRYTRRKNRICYLQEIFSNEMAKVDDSFFHRLEESFLVEEDKKHERHPIFGNIVDEVAYHEKYPTIYHLRKKLVDSTDKADLRLIYLALAHMIKFRGHFLIEGDLNPDNSDVDKLFIQLVQTYNQLFEENPINASGVDAKAILSARLSKSRRLENLIAQLPGEKKNGLFGNLIALSLGLTPNFKSNFDLAEDAKLQLSKDTYDDDLDNLLAQIGDQYADLFLAAKNLSDAILLSDILRVNTEITKAPLSASMIKRYDEHHQDLTLLKALVRQQLPEKYKEIFFDQSKNGYAGYIDGGASQEEFYKFIKPILEKMDGTEELLVKLNREDLLRKQRTFDNGSIPHQIHLGELHAILRRQEDFYPFLKDNREKIEKILTFRIPYYVGPLARGNSRFAWMTRKSEETITPWNFEEVVDKGASAQSFIERMTNFDKNLPNEKVLPKHSLLYEYFTVYNELTKVKYVTEGMRKPAFLSGEQKKAIVDLLFKTNRKVTVKQLKEDYFKKIECFDSVEISGVEDRFNASLGTYHDLLKIIKDKDFLDNEENEDILEDIVLTLTLFEDREMIEERLKTYAHLFDDKVMKQLKRRRYTGWGRLSRKLINGIRDKQSGKTILDFLKSDGFANRNFMQLIHDDSLTFKEDIQKAQVSGQGDSLHEHIANLAGSPAIKKGILQTVKVVDELVKVMGRHKPENIVIEMARENQTTQKGQKNSRERMKRIEEGIKELGSQILKEHPVENTQLQNEKLYLYYLQNGRDMYVDQELDINRLSDYDVDHIVPQSFLKDDSIDNKVLTRSDKARGKSDNVPSEEVVKKMKNYWRQLLNAKLITQRKFDNLTKAERGGLSELDKAGFIKRQLVETRQITKHVAQILDSRMNTKYDENDKLIREVKVITLKSKLVSDFRKDFQFYKVREINNYHHAHDAYLNAVVGTALIKKYPKLESEFVYGDYKVYDVRKMIAKSEQEIGKATAKYFFYSNIMNFFKTEITLANGEIRKRPLIETNGETGEIVWDKGRDFATVRKVLSMPQVNIVKKTEVQTGGFSKESILPKRNSDKLIARKKDWDPKKYGGFDSPTVAYSVLVVAKVEKGKSKKLKSVKELLGITIMERSSFEKNPIDFLEAKGYKEVKKDLIIKLPKYSLFELENGRKRMLASAGELQKGNELALPSKYVNFLYLASHYEKLKGSPEDNEQKQLFVEQHKHYLDEIIEQISEFSKRVILADANLDKVLSAYNKHRDKPIREQAENIIHLFTLTNLGAPAAFKYFDTTIDRKRYTSTKEVLDATLIHQSITGLYETRIDLSQLGGDGGPAPGSSGGSGGTLQLDDEYRLYSPLVKPDQNIQFWLEQFPQAWAETAGMGLAKQVPPQVIQLKASATPVSVRQYPLSKEAQEGIRPHVQRLIQQGILVPVQSPWNTPLLPVRKPGTNDYRPVQDLREVNKRVQDIHPTVPNPYNLLCALPPQRSWYTVLDLKDAFFCLRLHPTSQPLFAFEWRDPGTGRTGQLTWTRLPQGFKNSPTIFDEALHRDLANFRIQHPQVTLLQYVDDLLLAGATKQDCLEGTKALLLELSDLGYRASAKKAQICRREVTYLGYSLRDGQRWLTEARKKTVVQIPAPTTAKQVREFLGTAGFCRLWIPGFATLAAPLYPLTKEKGEFSWAPEHQKAFDAIKKALLSAPALALPDVTKPFTLYVDERKGVARGVLTQTLGPWRRPVAYLSKKLDPVASGWPVCLKAIAAVAILVKDADKLTLGQNITVIAPHALENIVRQPPDRWMTNARMTHYQSLLLTERVTFAPPAALNPATLLPEETDEPVTHDCHQLLIEETGVRKDLTDIPLTGEVLTWFTDGSSYVVEGKRMAGAAVVDGTRTIWASSLPEGTSAQKAELMALTQALRLAEGKSINIYTDSRYAFATAHVHGAIYKQRGLLTSAGREIKNKEEILSLLEALHLPKRLAIIHCPGHQKAKDPISRGNQMADRVAKQAAQGVNLLAGKRTADGSEFEKRTADGSEFESPKKKAKVE

SEQ ID NO: 7188 - protein, 2085 aa, synthetic construct
MPAAKRVKLDGGDKKYSIGLDIGTNSVGWAVITDEYKVPSKKFKVLGNTDRHSIKKNLIGALLFDSGETAEATRLKRTARRRYTRRKNRICYLQEIFSNEMAKVDDSFFHRLEESFLVEEDKKHERHPIFGNIVDEVAYHEKYPTIYHLRKKLVDSTDKADLRLIYLALAHMIKFRGHFLIEGDLNPDNSDVDKLFIQLVQTYNQLFEENPINASGVDAKAILSARLSKSRRLENLIAQLPGEKKNGLFGNLIALSLGLTPNFKSNFDLAEDAKLQLSKDTYDDDLDNLLAQIGDQYADLFLAAKNLSDAILLSDILRVNTEITKAPLSASMIKRYDEHHQDLTLLKALVRQQLPEKYKEIFFDQSKNGYAGYIDGGASQEEFYKFIKPILEKMDGTEELLVKLNREDLLRKQRTFDNGSIPHQIHLGELHAILRRQEDFYPFLKDNREKIEKILTFRIPYYVGPLARGNSRFAWMTRKSEETITPWNFEEVVDKGASAQSFIERMTNFDKNLPNEKVLPKHSLLYEYFTVYNELTKVKYVTEGMRKPAFLSGEQKKAIVDLLFKTNRKVTVKQLKEDYFKKIECFDSVEISGVEDRFNASLGTYHDLLKIIKDKDFLDNEENEDILEDIVLTLTLFEDREMIEERLKTYAHLFDDKVMKQLKRRRYTGWGRLSRKLINGIRDKQSGKTILDFLKSDGFANRNFMQLIHDDSLTFKEDIQKAQVSGQGDSLHEHIANLAGSPAIKKGILQTVKVVDELVKVMGRHKPENIVIEMARENQTTQKGQKNSRERMKRIEEGIKELGSQILKEHPVENTQLQNEKLYLYYLQNGRDMYVDQELDINRLSDYDVDHIVPQSFLKDDSIDNKVLTRSDKARGKSDNVPSEEVVKKMKNYWRQLLNAKLITQRKFDNLTKAERGGLSELDKAGFIKRQLVETRQITKHVAQILDSRMNTKYDENDKLIREVKVITLKSKLVSDFRKDFQFYKVREINNYHHAHDAYLNAVVGTALIKKYPKLESEFVYGDYKVYDVRKMIAKSEQEIGKATAKYFFYSNIMNFFKTEITLANGEIRKRPLIETNGETGEIVWDKGRDFATVRKVLSMPQVNIVKKTEVQTGGFSKESILPKRNSDKLIARKKDWDPKKYGGFDSPTVAYSVLVVAKVEKGKSKKLKSVKELLGITIMERSSFEKNPIDFLEAKGYKEVKKDLIIKLPKYSLFELENGRKRMLASAGELQKGNELALPSKYVNFLYLASHYEKLKGSPEDNEQKQLFVEQHKHYLDEIIEQISEFSKRVILADANLDKVLSAYNKHRDKPIREQAENIIHLFTLTNLGAPAAFKYFDTTIDRKRYTSTKEVLDATLIHQSITGLYETRIDLSQLGGDGGPAPGSSGGSGGIPWLMKKPLQLTTLVPLQEYEERLLKQTMLTGSYKEKLQSLFLKYDALWQHWENQVGHRRIKPHHIATGTVNPRPQKQYPINPKAKASIQTVINDLLKQGVLIQQNSIMNTPVYPVPKPDGKWRMVLDYREVNKTIPLIAAQNQHSAGILSSIFRGKYKTTLDLSNGFWAHSITPESYWLTAFTWLGQQYCWTRLPQGFLNSPALFNADVVDLLKEVPNVQVYVDDIYISHDDPREHLEQLEKVFSLLLNAGYVVSLKKSEIAQHEVEFLGFNITKEGRGLTETFKQKLLNITPPRDLKQLQSILGKLNFARNFIPNFSELVKPLYNIIATAPGKYITWTTDNSQQLQNIISMLNSAENLEERNPEVRLIMKVNTSPSAGYIRFYNEFAKRPIMYLNYVYTKAEVKFTNTEKLLTTIHKGLIKALDLGMGQEILVYSPIVSMTKIQKTPLPERKALPIRWITWMSYLEDPRIQFHYDKTLPELQQVPTVTDDIIAKIKHPSEFSMVFYTDGSAIKHPNVNKSHNAGMGIAQVQFKPEFTVINTWSIPLGDHTAQLAEVAAVEFACKKALKIDGPVLIVTDSFYVAESVNKELPYWQSNGFFNNKKKPLKHVSKWKSIADCIQLKPDIIIIHEKGHQPTASTFHTEGNNLADKLATQGSYVVNAGKRTADGSEFEKRTADGSEFESPKKKAKVE

SEQ ID NO: 7189 - protein, 2174 aa, synthetic construct
MPAAKRVKLDGGDKKYSIGLDIGTNSVGWAVITDEYKVPSKKFKVLGNTDRHSIKKNLIGALLFDSGETAEATRLKRTARRRYTRRKNRICYLQEIFSNEMAKVDDSFFHRLEESFLVEEDKKHERHPIFGNIVDEVAYHEKYPTIYHLRKKLVDSTDKADLRLIYLALAHMIKFRGHFLIEGDLNPDNSDVDKLFIQLVQTYNQLFEENPINASGVDAKAILSARLSKSRRLENLIAQLPGEKKNGLFGNLIALSLGLTPNFKSNFDLAEDAKLQLSKDTYDDDLDNLLAQIGDQYADLFLAAKNLSDAILLSDILRVNTEITKAPLSASMIKRYDEHHQDLTLLKALVRQQLPEKYKEIFFDQSKNGYAGYIDGGASQEEFYKFIKPILEKMDGTEELLVKLNREDLLRKQRTFDNGSIPHQIHLGELHAILRRQEDFYPFLKDNREKIEKILTFRIPYYVGPLARGNSRFAWMTRKSEETITPWNFEEVVDKGASAQSFIERMTNFDKNLPNEKVLPKHSLLYEYFTVYNELTKVKYVTEGMRKPAFLSGEQKKAIVDLLFKTNRKVTVKQLKEDYFKKIECFDSVEISGVEDRFNASLGTYHDLLKIIKDKDFLDNEENEDILEDIVLTLTLFEDREMIEERLKTYAHLFDDKVMKQLKRRRYTGWGRLSRKLINGIRDKQSGKTILDFLKSDGFANRNFMQLIHDDSLTFKEDIQKAQVSGQGDSLHEHIANLAGSPAIKKGILQTVKVVDELVKVMGRHKPENIVIEMARENQTTQKGQKNSRERMKRIEEGIKELGSQILKEHPVENTQLQNEKLYLYYLQNGRDMYVDQELDINRLSDYDVDHIVPQSFLKDDSIDNKVLTRSDKARGKSDNVPSEEVVKKMKNYWRQLLNAKLITQRKFDNLTKAERGGLSELDKAGFIKRQLVETRQITKHVAQILDSRMNTKYDENDKLIREVKVITLKSKLVSDFRKDFQFYKVREINNYHHAHDAYLNAVVGTALIKKYPKLESEFVYGDYKVYDVRKMIAKSEQEIGKATAKYFFYSNIMNFFKTEITLANGEIRKRPLIETNGETGEIVWDKGRDFATVRKVLSMPQVNIVKKTEVQTGGFSKESILPKRNSDKLIARKKDWDPKKYGGFDSPTVAYSVLVVAKVEKGKSKKLKSVKELLGITIMERSSFEKNPIDFLEAKGYKEVKKDLIIKLPKYSLFELENGRKRMLASAGELQKGNELALPSKYVNFLYLASHYEKLKGSPEDNEQKQLFVEQHKHYLDEIIEQISEFSKRVILADANLDKVLSAYNKHRDKPIREQAENIIHLFTLTNLGAPAAFKYFDTTIDRKRYTSTKEVLDATLIHQSITGLYETRIDLSQLGGDGGPAPGSSGGSGGMDPLQLLQPLEAEIKGTKLKAHWNSGATITCVPQAFLEEEVPIKNIWIKTIHGEKEQPVYYLTFKIQGRKVEAEVISSPYDYILVSPSDIPWLMKKPLQLTTLVPLQEYEERLLKQTMLTGSYKEKLQSLFLKYDALWQHWENQVGHRRIKPHHIATGTVNPRPQKQYPINPKAKASIQTVINDLLKQGVLIQQNSIMNTPVYPVPKPDGKWRMVLDYREVNKTIPLIAAQNQHSAGILSSIFRGKYKTTLDLSNGFWAHSITPESYWLTAFTWLGQQYCWTRLPQGFLNSPALFNADVVDLLKEVPNVQVYVDDIYISHDDPREHLEQLEKVFSLLLNAGYVVSLKKSEIAQHEVEFLGFNITKEGRGLTETFKQKLLNITPPRDLKQLQSILGLLNFARNFIPNFSELVKPLYNIIATAPGKYITWTTDNSQQLQNIISMLNSAENLEERNPEVRLIMKVNTSPSAGYIRFYNEFAKRPIMYLNYVYTKAEVKFTNTEKLLTTIHKGLIKALDLGMGQEILVYSPIVSMTKIQKTPLPERKALPIRWITWMSYLEDPRIQFHYDKTLPELQQVPTVTDDIIAKIKHPSEFSMVFYTDGSAIKHPNVNKSHNAGMGIAQVQFKPEFTVINTWSIPLGDHTAQLAEVAAVEFACKKALKIDGPVLIVTDSFYVAESVNKELPYWQSNGFFNNKKKPLKHVSKWKSIADCIQLKPDIIIIHEKGHQPTASTFHTEGNNLADKLATQGSYVVNAGKRTADGSEFEKRTADGSEFESPKKKAKVE

SEQ ID NO: 7190 - protein, 2174 aa, synthetic construct
MPAAKRVKLDGGDKKYSIGLDIGTNSVGWAVITDEYKVPSKKFKVLGNTDRHSIKKNLIGALLFDSGETAEATRLKRTARRRYTRRKNRICYLQEIFSNEMAKVDDSFFHRLEESFLVEEDKKHERHPIFGNIVDEVAYHEKYPTIYHLRKKLVDSTDKADLRLIYLALAHMIKFRGHFLIEGDLNPDNSDVDKLFIQLVQTYNQLFEENPINASGVDAKAILSARLSKSRRLENLIAQLPGEKKNGLFGNLIALSLGLTPNFKSNFDLAEDAKLQLSKDTYDDDLDNLLAQIGDQYADLFLAAKNLSDAILLSDILRVNTEITKAPLSASMIKRYDEHHQDLTLLKALVRQQLPEKYKEIFFDQSKNGYAGYIDGGASQEEFYKFIKPILEKMDGTEELLVKLNREDLLRKQRTFDNGSIPHQIHLGELHAILRRQEDFYPFLKDNREKIEKILTFRIPYYVGPLARGNSRFAWMTRKSEETITPWNFEEVVDKGASAQSFIERMTNFDKNLPNEKVLPKHSLLYEYFTVYNELTKVKYVTEGMRKPAFLSGEQKKAIVDLLFKTNRKVTVKQLKEDYFKKIECFDSVEISGVEDRFNASLGTYHDLLKIIKDKDFLDNEENEDILEDIVLTLTLFEDREMIEERLKTYAHLFDDKVMKQLKRRRYTGWGRLSRKLINGIRDKQSGKTILDFLKSDGFANRNFMQLIHDDSLTFKEDIQKAQVSGQGDSLHEHIANLAGSPAIKKGILQTVKVVDELVKVMGRHKPENIVIEMARENQTTQKGQKNSRERMKRIEEGIKELGSQILKEHPVENTQLQNEKLYLYYLQNGRDMYVDQELDINRLSDYDVDHIVPQSFLKDDSIDNKVLTRSDKARGKSDNVPSEEVVKKMKNYWRQLLNAKLITQRKFDNLTKAERGGLSELDKAGFIKRQLVETRQITKHVAQILDSRMNTKYDENDKLIREVKVITLKSKLVSDFRKDFQFYKVREINNYHHAHDAYLNAVVGTALIKKYPKLESEFVYGDYKVYDVRKMIAKSEQEIGKATAKYFFYSNIMNFFKTEITLANGEIRKRPLIETNGETGEIVWDKGRDFATVRKVLSMPQVNIVKKTEVQTGGFSKESILPKRNSDKLIARKKDWDPKKYGGFDSPTVAYSVLVVAKVEKGKSKKLKSVKELLGITIMERSSFEKNPIDFLEAKGYKEVKKDLIIKLPKYSLFELENGRKRMLASAGELQKGNELALPSKYVNFLYLASHYEKLKGSPEDNEQKQLFVEQHKHYLDEIIEQISEFSKRVILADANLDKVLSAYNKHRDKPIREQAENIIHLFTLTNLGAPAAFKYFDTTIDRKRYTSTKEVLDATLIHQSITGLYETRIDLSQLGGDGGPAPGSSGGSGGMNPLQLLQPLPAEVKGTKLLAHWNSGATITCIPESFLEDEQPIKQTLIKTIHGEKQQNVYYLTFKVKGRKVEAEVIASPYEYILLSPTDVPWLTQQPLQLTILVPLQEYQDRILNKTALPEEQKQQLKALFTKYDNLWQHWENQVGHRKIRPHNIATGDYPPRPQKQYPINPKAKPSIQIVIDDLLKQGVLTPQNSTMNTPVYPVPKPDGRWRMVLDYREVNKTIPLTAAQNQHSAGILATIVRQKYKTTLDLANGFWAHPITPDSYWLTAFTWQGKQYCWTRLPQGFLNSPALFTADAVDLLKEVPNVQVYVDDIYLSHDNPHEHIQQLEKVFQILLQAGYVVSLKKSEIGQRTVEFLGFNITKEGRGLTDTFKTKLLNVTPPKDLKQLQSILGLLNFARNFIPNFAELVQTLYNLIASSKGKYIEWTEDNTKQLNKVIEALNTASNLEERLPDQRLVIKVNTSPSAGYVRYYNESGKKPIMYLNYVFSKAELKFSMLEKLLTTMHKALIKAMDLAMGQEILVYSPIVSMTKIQKTPLPERKALPIRWITWMTYLEDPRIQFHYDKTLPELKHIPDVYTSSIPPLKHPSQYEGVFCTDGSAIKSPDPTKSNNAGMGIVHAIYNPEYKILNQWSIPLGHHTAQMAEIAAVEFACKKALKVPGPVLVITDSFYVAESANKELPYWKSNGFVNNKKEPLKHISKWKSIAECLSIKPDITIQHEKGHQPINTSIHTEGNALADKLATQGSYVVNAGKRTADGSEFEKRTADGSEFESPKKKAKVE

SEQ ID NO: 7191 - protein, 2092 aa, synthetic construct
MPAAKRVKLDGGDKKYSIGLDIGTNSVGWAVITDEYKVPSKKFKVLGNTDRHSIKKNLIGALLFDSGETAEATRLKRTARRRYTRRKNRICYLQEIFSNEMAKVDDSFFHRLEESFLVEEDKKHERHPIFGNIVDEVAYHEKYPTIYHLRKKLVDSTDKADLRLIYLALAHMIKFRGHFLIEGDLNPDNSDVDKLFIQLVQTYNQLFEENPINASGVDAKAILSARLSKSRRLENLIAQLPGEKKNGLFGNLIALSLGLTPNFKSNFDLAEDAKLQLSKDTYDDDLDNLLAQIGDQYADLFLAAKNLSDAILLSDILRVNTEITKAPLSASMIKRYDEHHQDLTLLKALVRQQLPEKYKEIFFDQSKNGYAGYIDGGASQEEFYKFIKPILEKMDGTEELLVKLNREDLLRKQRTFDNGSIPHQIHLGELHAILRRQEDFYPFLKDNREKIEKILTFRIPYYVGPLARGNSRFAWMTRKSEETITPWNFEEVVDKGASAQSFIERMTNFDKNLPNEKVLPKHSLLYEYFTVYNELTKVKYVTEGMRKPAFLSGEQKKAIVDLLFKTNRKVTVKQLKEDYFKKIECFDSVEISGVEDRFNASLGTYHDLLKIIKDKDFLDNEENEDILEDIVLTLTLFEDREMIEERLKTYAHLFDDKVMKQLKRRRYTGWGRLSRKLINGIRDKQSGKTILDFLKSDGFANRNFMQLIHDDSLTFKEDIQKAQVSGQGDSLHEHIANLAGSPAIKKGILQTVKVVDELVKVMGRHKPENIVIEMARENQTTQKGQKNSRERMKRIEEGIKELGSQILKEHPVENTQLQNEKLYLYYLQNGRDMYVDQELDINRLSDYDVDHIVPQSFLKDDSIDNKVLTRSDKARGKSDNVPSEEVVKKMKNYWRQLLNAKLITQRKFDNLTKAERGGLSELDKAGFIKRQLVETRQITKHVAQILDSRMNTKYDENDKLIREVKVITLKSKLVSDFRKDFQFYKVREINNYHHAHDAYLNAVVGTALIKKYPKLESEFVYGDYKVYDVRKMIAKSEQEIGKATAKYFFYSNIMNFFKTEITLANGEIRKRPLIETNGETGEIVWDKGRDFATVRKVLSMPQVNIVKKTEVQTGGFSKESILPKRNSDKLIARKKDWDPKKYGGFDSPTVAYSVLVVAKVEKGKSKKLKSVKELLGITIMERSSFEKNPIDFLEAKGYKEVKKDLIIKLPKYSLFELENGRKRMLASAGELQKGNELALPSKYVNFLYLASHYEKLKGSPEDNEQKQLFVEQHKHYLDEIIEQISEFSKRVILADANLDKVLSAYNKHRDKPIREQAENIIHLFTLTNLGAPAAFKYFDTTIDRKRYTSTKEVLDATLIHQSITGLYETRIDLSQLGGDGGPAPGSSGGSGGVLNLEEEYRLHEKPVPSSIDPSWLQLFPTVWAERAGMGLANQVPPVVVELRSGASPVAVRQYPMSKEAREGIRPHIQRFLDLGVLVPCQSPWNTPLLPVKKPGTNDYRPVQDLREINKRVQDIHPTVPNPYNLLSSLPPSHTWYSVLDLKDAFFCLKLHPNSQPLFAFEWRDPEKGNTGQLTWTRLPQGFKNSPTLFNEALHRDLAPFRALNPQVVLLQYVDDLLVAAPTYRDCKEGTQKLLQELSKLGYRVSAKKAQLCQKEVTYLGYLLKEGKRWLTPARKATVMKIPPPTTPRQVREFLGTAGFCRLWIPGFASLAAPLYPLTKPSIPFIWTEEHQKAFDRIKEALLSAPALALPDLTKPFTLYVDERAGVARGVLTQTLGPWRRPVAYLSKKLDPVASGWPTCLKAVAAVALLLKDADKLTLGQNVTVIASHSLESIVRQPPDRWMTNARMTHYQSLLLNERVSFAPPAVLNPATLLPVESEATPVHRCSEILAEETGTRRDLKDQPLPGVPAWYTDGSSFIAEGKRRAGAAIVDGKRTVWASSLPEGTSAQKAELVALTQALRLAEGKDINIYTDSRYAFATAHIHGAIYKQRGWLTSAGKDIKNKEEILALLEAIHLPKRVAIIHCPGHQKGNDPVATGNRRADEAAKQAALSTRVLAETTKPAGKRTADGSEFEKRTADGSEFESPKKKAKVE

SEQ ID NO: 7192 - protein, 2092 aa, synthetic construct
MPAAKRVKLDGGDKKYSIGLDIGTNSVGWAVITDEYKVPSKKFKVLGNTDRHSIKKNLIGALLFDSGETAEATRLKRTARRRYTRRKNRICYLQEIFSNEMAKVDDSFFHRLEESFLVEEDKKHERHPIFGNIVDEVAYHEKYPTIYHLRKKLVDSTDKADLRLIYLALAHMIKFRGHFLIEGDLNPDNSDVDKLFIQLVQTYNQLFEENPINASGVDAKAILSARLSKSRRLENLIAQLPGEKKNGLFGNLIALSLGLTPNFKSNFDLAEDAKLQLSKDTYDDDLDNLLAQIGDQYADLFLAAKNLSDAILLSDILRVNTEITKAPLSASMIKRYDEHHQDLTLLKALVRQQLPEKYKEIFFDQSKNGYAGYIDGGASQEEFYKFIKPILEKMDGTEELLVKLNREDLLRKQRTFDNGSIPHQIHLGELHAILRRQEDFYPFLKDNREKIEKILTFRIPYYVGPLARGNSRFAWMTRKSEETITPWNFEEVVDKGASAQSFIERMTNFDKNLPNEKVLPKHSLLYEYFTVYNELTKVKYVTEGMRKPAFLSGEQKKAIVDLLFKTNRKVTVKQLKEDYFKKIECFDSVEISGVEDRFNASLGTYHDLLKIIKDKDFLDNEENEDILEDIVLTLTLFEDREMIEERLKTYAHLFDDKVMKQLKRRRYTGWGRLSRKLINGIRDKQSGKTILDFLKSDGFANRNFMQLIHDDSLTFKEDIQKAQVSGQGDSLHEHIANLAGSPAIKKGILQTVKVVDELVKVMGRHKPENIVIEMARENQTTQKGQKNSRERMKRIEEGIKELGSQILKEHPVENTQLQNEKLYLYYLQNGRDMYVDQELDINRLSDYDVDHIVPQSFLKDDSIDNKVLTRSDKARGKSDNVPSEEVVKKMKNYWRQLLNAKLITQRKFDNLTKAERGGLSELDKAGFIKRQLVETRQITKHVAQILDSRMNTKYDENDKLIREVKVITLKSKLVSDFRKDFQFYKVREINNYHHAHDAYLNAVVGTALIKKYPKLESEFVYGDYKVYDVRKMIAKSEQEIGKATAKYFFYSNIMNFFKTEITLANGEIRKRPLIETNGETGEIVWDKGRDFATVRKVLSMPQVNIVKKTEVQTGGFSKESILPKRNSDKLIARKKDWDPKKYGGFDSPTVAYSVLVVAKVEKGKSKKLKSVKELLGITIMERSSFEKNPIDFLEAKGYKEVKKDLIIKLPKYSLFELENGRKRMLASAGELQKGNELALPSKYVNFLYLASHYEKLKGSPEDNEQKQLFVEQHKHYLDEIIEQISEFSKRVILADANLDKVLSAYNKHRDKPIREQAENIIHLFTLTNLGAPAAFKYFDTTIDRKRYTSTKEVLDATLIHQSITGLYETRIDLSQLGGDGGPAPGSSGGSGGVLNLEEEYRLHEKPVPSSIDPSWLQLFPTVWAERAGMGLANQVPPVVVELRSGASPVAVRQYPMSKEAREGIRPHIQRFLDLGVLVPCQSPWNTPLLPVKKPGTNDYRPVQDLREINKRVQDIHPTVPNPYNLLSSLPPSHTWYSVLDLKDAFFCLKLHPNSQPLFAFEWRDPEKGNTGQLTWTRLPQGFKNSPTLFNEALHRDLAPFRALNPQVVLLQYVDDLLVAAPTYRDCKEGTQKLLQELSKLGYRVSAKKAQLCQKEVTYLGYLLKEGKRWLTPARKATVMKIPPPTTPRQVREFLGKAGFCRLFIPGFASLAAPLYPLTKPSIPFIWTEEHQKAFDRIKEALLSAPALALPDLTKPFTLYVDERAGVARGVLTQTLGPWRRPVAYLSKKLDPVASGWPTCLKAVAAVALLLKDADKLTLGQNVTVIASHSLESIVRQPPDRWMTNARMTHYQSLLLNERVSFAPPAVLNPATLLPVESEATPVHRCSEILAEETGTRRDLKDQPLPGVPAWYTDGSSFIAEGKRRAGAAIVDGKRTVWASSLPEGTSAQKAELVALTQALRLAEGKDINIYTDSRYAFATAHIHGAIYKQRGWLTSAGKDIKNKEEILALLEAIHLPKRVAIIHCPGHQKGNDPVATGNRRADEAAKQAALSTRVLAETTKPAGKRTADGSEFEKRTADGSEFESPKKKAKVE

SEQ ID NO: 7193 - protein, 2095 aa, synthetic construct
MPAAKRVKLDGGDKKYSIGLDIGTNSVGWAVITDEYKVPSKKFKVLGNTDRHSIKKNLIGALLFDSGETAEATRLKRTARRRYTRRKNRICYLQEIFSNEMAKVDDSFFHRLEESFLVEEDKKHERHPIFGNIVDEVAYHEKYPTIYHLRKKLVDSTDKADLRLIYLALAHMIKFRGHFLIEGDLNPDNSDVDKLFIQLVQTYNQLFEENPINASGVDAKAILSARLSKSRRLENLIAQLPGEKKNGLFGNLIALSLGLTPNFKSNFDLAEDAKLQLSKDTYDDDLDNLLAQIGDQYADLFLAAKNLSDAILLSDILRVNTEITKAPLSASMIKRYDEHHQDLTLLKALVRQQLPEKYKEIFFDQSKNGYAGYIDGGASQEEFYKFIKPILEKMDGTEELLVKLNREDLLRKQRTFDNGSIPHQIHLGELHAILRRQEDFYPFLKDNREKIEKILTFRIPYYVGPLARGNSRFAWMTRKSEETITPWNFEEVVDKGASAQSFIERMTNFDKNLPNEKVLPKHSLLYEYFTVYNELTKVKYVTEGMRKPAFLSGEQKKAIVDLLFKTNRKVTVKQLKEDYFKKIECFDSVEISGVEDRFNASLGTYHDLLKIIKDKDFLDNEENEDILEDIVLTLTLFEDREMIEERLKTYAHLFDDKVMKQLKRRRYTGWGRLSRKLINGIRDKQSGKTILDFLKSDGFANRNFMQLIHDDSLTFKEDIQKAQVSGQGDSLHEHIANLAGSPAIKKGILQTVKVVDELVKVMGRHKPENIVIEMARENQTTQKGQKNSRERMKRIEEGIKELGSQILKEHPVENTQLQNEKLYLYYLQNGRDMYVDQELDINRLSDYDVDHIVPQSFLKDDSIDNKVLTRSDKARGKSDNVPSEEVVKKMKNYWRQLLNAKLITQRKFDNLTKAERGGLSELDKAGFIKRQLVETRQITKHVAQILDSRMNTKYDENDKLIREVKVITLKSKLVSDFRKDFQFYKVREINNYHHAHDAYLNAVVGTALIKKYPKLESEFVYGDYKVYDVRKMIAKSEQEIGKATAKYFFYSNIMNFFKTEITLANGEIRKRPLIETNGETGEIVWDKGRDFATVRKVLSMPQVNIVKKTEVQTGGFSKESILPKRNSDKLIARKKDWDPKKYGGFDSPTVAYSVLVVAKVEKGKSKKLKSVKELLGITIMERSSFEKNPIDFLEAKGYKEVKKDLIIKLPKYSLFELENGRKRMLASAGELQKGNELALPSKYVNFLYLASHYEKLKGSPEDNEQKQLFVEQHKHYLDEIIEQISEFSKRVILADANLDKVLSAYNKHRDKPIREQAENIIHLFTLTNLGAPAAFKYFDTTIDRKRYTSTKEVLDATLIHQSITGLYETRIDLSQLGGDGGGGSEAAAKPAPGGTLQLEEEYRLFEPESTQKQEMDIWLKNFPQAWAETGGMGTAHCQAPVLIQLKATATPISIRQYPMPHEAYQGIKPHIRRMLDQGILKPCQSPWNTPLLPVKKPGTEDYRPVQDLREVNKRVEDIHPTVPNPYNLLSTLPPSHPWYTVLDLKDAFFCLRLHSESQLLFAFEWRDPEIGLSGQLTWTRLPQGFKNSPTLFNEALHSDLADFRVRYPALVLLQYVDDLLLAAATRTECLEGTKALLETLGNKGYRASAKKAQICLQEVTYLGYSLKDGQRWLTKARKEAILSIPVPKNSRQVREFLGTAGYCRLWIPGFAELAAPLYPLTRPGTLFQWGTEQQLAFEDIKKALLSSPALGLPDITKPFELFIDENSGFAKGVLVQKLGPWKRPVAYLSKKLDTVASGWPPCLRMVAAIAILVKDAGKLTLGQPLTILTSHPVEALVRQPPNKWLSNARMTHYQAMLLDAERVHFGPTVSLNPATLLPLPSGGNHHDCLQILAETHGTRPDLTDQPLPDADLTWYTDGSSFIRNGEREAGAAVTTESEVIWAAPLPPGTSAQRAELIALTQALKMAEGKKLTVYTDSRYAFATTHVHGEIYRRRGWLTSEGKEIKNKNEILALLEALFLPKRLSIIHCPGHQKGDSPQAKGNRLADDTAKKAATETHSSLTVLPAGKRTADGSEFEKRTADGSEFESPKKKAKVE

SEQ ID NO: 7194 - protein, 2095 aa, synthetic construct
MPAAKRVKLDGGDKKYSIGLDIGTNSVGWAVITDEYKVPSKKFKVLGNTDRHSIKKNLIGALLFDSGETAEATRLKRTARRRYTRRKNRICYLQEIFSNEMAKVDDSFFHRLEESFLVEEDKKHERHPIFGNIVDEVAYHEKYPTIYHLRKKLVDSTDKADLRLIYLALAHMIKFRGHFLIEGDLNPDNSDVDKLFIQLVQTYNQLFEENPINASGVDAKAILSARLSKSRRLENLIAQLPGEKKNGLFGNLIALSLGLTPNFKSNFDLAEDAKLQLSKDTYDDDLDNLLAQIGDQYADLFLAAKNLSDAILLSDILRVNTEITKAPLSASMIKRYDEHHQDLTLLKALVRQQLPEKYKEIFFDQSKNGYAGYIDGGASQEEFYKFIKPILEKMDGTEELLVKLNREDLLRKQRTFDNGSIPHQIHLGELHAILRRQEDFYPFLKDNREKIEKILTFRIPYYVGPLARGNSRFAWMTRKSEETITPWNFEEVVDKGASAQSFIERMTNFDKNLPNEKVLPKHSLLYEYFTVYNELTKVKYVTEGMRKPAFLSGEQKKAIVDLLFKTNRKVTVKQLKEDYFKKIECFDSVEISGVEDRFNASLGTYHDLLKIIKDKDFLDNEENEDILEDIVLTLTLFEDREMIEERLKTYAHLFDDKVMKQLKRRRYTGWGRLSRKLINGIRDKQSGKTILDFLKSDGFANRNFMQLIHDDSLTFKEDIQKAQVSGQGDSLHEHIANLAGSPAIKKGILQTVKVVDELVKVMGRHKPENIVIEMARENQTTQKGQKNSRERMKRIEEGIKELGSQILKEHPVENTQLQNEKLYLYYLQNGRDMYVDQELDINRLSDYDVDHIVPQSFLKDDSIDNKVLTRSDKARGKSDNVPSEEVVKKMKNYWRQLLNAKLITQRKFDNLTKAERGGLSELDKAGFIKRQLVETRQITKHVAQILDSRMNTKYDENDKLIREVKVITLKSKLVSDFRKDFQFYKVREINNYHHAHDAYLNAVVGTALIKKYPKLESEFVYGDYKVYDVRKMIAKSEQEIGKATAKYFFYSNIMNFFKTEITLANGEIRKRPLIETNGETGEIVWDKGRDFATVRKVLSMPQVNIVKKTEVQTGGFSKESILPKRNSDKLIARKKDWDPKKYGGFDSPTVAYSVLVVAKVEKGKSKKLKSVKELLGITIMERSSFEKNPIDFLEAKGYKEVKKDLIIKLPKYSLFELENGRKRMLASAGELQKGNELALPSKYVNFLYLASHYEKLKGSPEDNEQKQLFVEQHKHYLDEIIEQISEFSKRVILADANLDKVLSAYNKHRDKPIREQAENIIHLFTLTNLGAPAAFKYFDTTIDRKRYTSTKEVLDATLIHQSITGLYETRIDLSQLGGDGGGGSEAAAKPAPGGTLQLEEEYRLFEPESTQKQEMDIWLKNFPQAWAETGGMGTAHCQAPVLIQLKATATPISIRQYPMPHEAYQGIKPHIRRMLDQGILKPCQSPWNTPLLPVKKPGTEDYRPVQDLREVNKRVEDIHPTVPNPYNLLSTLPPSHPWYTVLDLKDAFFCLRLHSESQLLFAFEWRDPEIGLSGQLTWTRLPQGFKNSPTLFNEALHSDLADFRVRYPALVLLQYVDDLLLAAATRTECLEGTKALLETLGNKGYRASAKKAQICLQEVTYLGYSLKDGQRWLTKARKEAILSIPVPKNSRQVREFLGKAGYCRLFIPGFAELAAPLYPLTRPGTLFQWGTEQQLAFEDIKKALLSSPALGLPDITKPFELFIDENSGFAKGVLVQKLGPWKRPVAYLSKKLDTVASGWPPCLRMVAAIAILVKDAGKLTLGQPLTILTSHPVEALVRQPPNKWLSNARMTHYQAMLLDAERVHFGPTVSLNPATLLPLPSGGNHHDCLQILAETHGTRPDLTDQPLPDADLTWYTDGSSFIRNGEREAGAAVTTESEVIWAAPLPPGTSAQRAELIALTQALKMAEGKKLTVYTDSRYAFATTHVHGEIYRRRGWLTSEGKEIKNKNEILALLEALFLPKRLSIIHCPGHQKGDSPQAKGNRLADDTAKKAATETHSSLTVLPAGKRTADGSEFEKRTADGSEFESPKKKAKVE

SEQ ID NO: 7195 - protein, 2176 aa, synthetic construct
MPAAKRVKLDGGDKKYSIGLDIGTNSVGWAVITDEYKVPSKKFKVLGNTDRHSIKKNLIGALLFDSGETAEATRLKRTARRRYTRRKNRICYLQEIFSNEMAKVDDSFFHRLEESFLVEEDKKHERHPIFGNIVDEVAYHEKYPTIYHLRKKLVDSTDKADLRLIYLALAHMIKFRGHFLIEGDLNPDNSDVDKLFIQLVQTYNQLFEENPINASGVDAKAILSARLSKSRRLENLIAQLPGEKKNGLFGNLIALSLGLTPNFKSNFDLAEDAKLQLSKDTYDDDLDNLLAQIGDQYADLFLAAKNLSDAILLSDILRVNTEITKAPLSASMIKRYDEHHQDLTLLKALVRQQLPEKYKEIFFDQSKNGYAGYIDGGASQEEFYKFIKPILEKMDGTEELLVKLNREDLLRKQRTFDNGSIPHQIHLGELHAILRRQEDFYPFLKDNREKIEKILTFRIPYYVGPLARGNSRFAWMTRKSEETITPWNFEEVVDKGASAQSFIERMTNFDKNLPNEKVLPKHSLLYEYFTVYNELTKVKYVTEGMRKPAFLSGEQKKAIVDLLFKTNRKVTVKQLKEDYFKKIECFDSVEISGVEDRFNASLGTYHDLLKIIKDKDFLDNEENEDILEDIVLTLTLFEDREMIEERLKTYAHLFDDKVMKQLKRRRYTGWGRLSRKLINGIRDKQSGKTILDFLKSDGFANRNFMQLIHDDSLTFKEDIQKAQVSGQGDSLHEHIANLAGSPAIKKGILQTVKVVDELVKVMGRHKPENIVIEMARENQTTQKGQKNSRERMKRIEEGIKELGSQILKEHPVENTQLQNEKLYLYYLQNGRDMYVDQELDINRLSDYDVDHIVPQSFLKDDSIDNKVLTRSDKARGKSDNVPSEEVVKKMKNYWRQLLNAKLITQRKFDNLTKAERGGLSELDKAGFIKRQLVETRQITKHVAQILDSRMNTKYDENDKLIREVKVITLKSKLVSDFRKDFQFYKVREINNYHHAHDAYLNAVVGTALIKKYPKLESEFVYGDYKVYDVRKMIAKSEQEIGKATAKYFFYSNIMNFFKTEITLANGEIRKRPLIETNGETGEIVWDKGRDFATVRKVLSMPQVNIVKKTEVQTGGFSKESILPKRNSDKLIARKKDWDPKKYGGFDSPTVAYSVLVVAKVEKGKSKKLKSVKELLGITIMERSSFEKNPIDFLEAKGYKEVKKDLIIKLPKYSLFELENGRKRMLASAGELQKGNELALPSKYVNFLYLASHYEKLKGSPEDNEQKQLFVEQHKHYLDEIIEQISEFSKRVILADANLDKVLSAYNKHRDKPIREQAENIIHLFTLTNLGAPAAFKYFDTTIDRKRYTSTKEVLDATLIHQSITGLYETRIDLSQLGGDGGGGSEAAAKPAPGGMNPLQLLQPLPAEIKGTKLLAHWNSGATITCIPESFLEDEQPIKKTLIKTIHGEKQQNVYYVTFKVKGRKVEAEVIASPYEYILLSPTDVPWLTQQPLQLTILVPLQEYQEKILSKTALPEDQKQQLKTLFVKYDNLWQHWENQVGHRKIRPHNIATGDYPPRPQKQYPINPKAKPSIQIVIDDLLKQGVLTPQNSTMNTPVYPVPKPDGRWRMVLDYREVNKTIPLTAAQNQHSAGILATIVRQKYKTTLDLANGFWAHPITPESYWLTAFTWQGKQYCWTRLPQGFLNSPALFNADVVDLLKEIPNVQVYVDDIYLSHDDPKEHVQQLEKVFQILLQAGYVVSLKKSEIGQKTVEFLGFNITKEGRGLTDTFKTKLLNITPPKDLKQLQSILGKLNFARNFIPNFAELVQPLYNLIAPAKGKYIEWSEENTKQLNMVIEALNTASNLEERLPEQRLVIKVNTSPSAGYVRYYNETGKKPIMYLNYVFSKAELKFSMLEKLLTTMHKALIKAMDLAMGQEILVYSPIVSMTKIQKTPLPERKALPIRWITWMTYLEDPRIQFHYDKTLPELKHIPDVYTSSQSPVKHPSQYEGVFYTDGSAIKSPDPTKSNNAGMGIVHATYKPEYQVLNQWSIPLGNHTAQMAEIAAVEFACKKALKIPGPVLVITDSFYVAESANKELPYWKSNGFVNNKKKPLKHISKWKSIAECLSMKPDITIQHEKGISLQIPVFILKGNALADKLATQGSYVVNAGKRTADGSEFEKRTADGSEFESPKKKAKVE

SEQ ID NO: 7196 - protein, 2218 aa, synthetic construct
MPAAKRVKLDGGDKKYSIGLDIGTNSVGWAVITDEYKVPSKKFKVLGNTDRHSIKKNLIGALLFDSGETAEATRLKRTARRRYTRRKNRICYLQEIFSNEMAKVDDSFFHRLEESFLVEEDKKHERHPIFGNIVDEVAYHEKYPTIYHLRKKLVDSTDKADLRLIYLALAHMIKFRGHFLIEGDLNPDNSDVDKLFIQLVQTYNQLFEENPINASGVDAKAILSARLSKSRRLENLIAQLPGEKKNGLFGNLIALSLGLTPNFKSNFDLAEDAKLQLSKDTYDDDLDNLLAQIGDQYADLFLAAKNLSDAILLSDILRVNTEITKAPLSASMIKRYDEHHQDLTLLKALVRQQLPEKYKEIFFDQSKNGYAGYIDGGASQEEFYKFIKPILEKMDGTEELLVKLNREDLLRKQRTFDNGSIPHQIHLGELHAILRRQEDFYPFLKDNREKIEKILTFRIPYYVGPLARGNSRFAWMTRKSEETITPWNFEEVVDKGASAQSFIERMTNFDKNLPNEKVLPKHSLLYEYFTVYNELTKVKYVTEGMRKPAFLSGEQKKAIVDLLFKTNRKVTVKQLKEDYFKKIECFDSVEISGVEDRFNASLGTYHDLLKIIKDKDFLDNEENEDILEDIVLTLTLFEDREMIEERLKTYAHLFDDKVMKQLKRRRYTGWGRLSRKLINGIRDKQSGKTILDFLKSDGFANRNFMQLIHDDSLTFKEDIQKAQVSGQGDSLHEHIANLAGSPAIKKGILQTVKVVDELVKVMGRHKPENIVIEMARENQTTQKGQKNSRERMKRIEEGIKELGSQILKEHPVENTQLQNEKLYLYYLQNGRDMYVDQELDINRLSDYDVDHIVPQSFLKDDSIDNKVLTRSDKARGKSDNVPSEEVVKKMKNYWRQLLNAKLITQRKFDNLTKAERGGLSELDKAGFIKRQLVETRQITKHVAQILDSRMNTKYDENDKLIREVKVITLKSKLVSDFRKDFQFYKVREINNYHHAHDAYLNAVVGTALIKKYPKLESEFVYGDYKVYDVRKMIAKSEQEIGKATAKYFFYSNIMNFFKTEITLANGEIRKRPLIETNGETGEIVWDKGRDFATVRKVLSMPQVNIVKKTEVQTGGFSKESILPKRNSDKLIARKKDWDPKKYGGFDSPTVAYSVLVVAKVEKGKSKKLKSVKELLGITIMERSSFEKNPIDFLEAKGYKEVKKDLIIKLPKYSLFELENGRKRMLASAGELQKGNELALPSKYVNFLYLASHYEKLKGSPEDNEQKQLFVEQHKHYLDEIIEQISEFSKRVILADANLDKVLSAYNKHRDKPIREQAENIIHLFTLTNLGAPAAFKYFDTTIDRKRYTSTKEVLDATLIHQSITGLYETRIDLSQLGGDGGGGSEAAAKPAPGGTLGDQGSRGSDPLPEPRVTLTVEGIPTEFLVNTGAEHSVLTKPMGKMGSKRTVVAGATGSKVYPWTTKRLLKIGQKQVTHSFLVIPECPAPLLGRDLLTKLKAQIQFSTEGPQVTWEDRPAMCLVLNLEEEYRLHEKPVPPSIDPSWLQLFPMVWAEKAGMGLANQVPPVVVELKSDASPVAVRQYPMSKEAREGIRPHIQRFLDLGILVPCQSPWNTPLLPVKKPGTNDYRPVQDLREVNKRVQDIHPTVPNPYNLLSSLPPSHTWYSVLDLKDAFFCLKLHPNSQPLFAFEWRDPEKGNTGQLTWTRLPQGFKNSPTLFNEALHRDLASFRALNPQVVMLQYVDDLLVAAPTYRDCKEGTRRLLQELSKLGYRVSAKKAQLCREEVTYLGYLLKGGKRWLTPARKATVMKIPTPTTPRQVREFLGTAGFCRLWIPGFASLAAPLYPLTRPKVPFTWTEAHQEAFGRIKEALLSAPALALPDLTKPFALYVDEKEGVARGVLTQTLGPWRRPVAYLSKKLDPVASGWPTCLKAIAAVALLLKDADKLTLGQNVLVIAPHNLESIVRQPPDRWMTNARMTHYQSLLLNERVSFAPPAILNPATLLPVESDDTPIHICSEILAEETGTRPDLRDQPLPGVPAWYTDGSSFIMDGRRQAGAAIVDNKRTVWASNLPEGTSAQKAELIALTQALRLAEGKSINIYTDSRYAFATAHVHGAIYKQRGWLTSAGKDIKNKEEILALLEAIHLPKRVAIIHCPGHQRGTDPVATGNRKADEAAKQAAQSTRILTETTKNAGKRTADGSEFEKRTADGSEFESPKKKAKVE

SEQ ID NO: 7197 - protein, 2218 aa, synthetic construct
MPAAKRVKLDGGDKKYSIGLDIGTNSVGWAVITDEYKVPSKKFKVLGNTDRHSIKKNLIGALLFDSGETAEATRLKRTARRRYTRRKNRICYLQEIFSNEMAKVDDSFFHRLEESFLVEEDKKHERHPIFGNIVDEVAYHEKYPTIYHLRKKLVDSTDKADLRLIYLALAHMIKFRGHFLIEGDLNPDNSDVDKLFIQLVQTYNQLFEENPINASGVDAKAILSARLSKSRRLENLIAQLPGEKKNGLFGNLIALSLGLTPNFKSNFDLAEDAKLQLSKDTYDDDLDNLLAQIGDQYADLFLAAKNLSDAILLSDILRVNTEITKAPLSASMIKRYDEHHQDLTLLKALVRQQLPEKYKEIFFDQSKNGYAGYIDGGASQEEFYKFIKPILEKMDGTEELLVKLNREDLLRKQRTFDNGSIPHQIHLGELHAILRRQEDFYPFLKDNREKIEKILTFRIPYYVGPLARGNSRFAWMTRKSEETITPWNFEEVVDKGASAQSFIERMTNFDKNLPNEKVLPKHSLLYEYFTVYNELTKVKYVTEGMRKPAFLSGEQKKAIVDLLFKTNRKVTVKQLKEDYFKKIECFDSVEISGVEDRFNASLGTYHDLLKIIKDKDFLDNEENEDILEDIVLTLTLFEDREMIEERLKTYAHLFDDKVMKQLKRRRYTGWGRLSRKLINGIRDKQSGKTILDFLKSDGFANRNFMQLIHDDSLTFKEDIQKAQVSGQGDSLHEHIANLAGSPAIKKGILQTVKVVDELVKVMGRHKPENIVIEMARENQTTQKGQKNSRERMKRIEEGIKELGSQILKEHPVENTQLQNEKLYLYYLQNGRDMYVDQELDINRLSDYDVDHIVPQSFLKDDSIDNKVLTRSDKARGKSDNVPSEEVVKKMKNYWRQLLNAKLITQRKFDNLTKAERGGLSELDKAGFIKRQLVETRQITKHVAQILDSRMNTKYDENDKLIREVKVITLKSKLVSDFRKDFQFYKVREINNYHHAHDAYLNAVVGTALIKKYPKLESEFVYGDYKVYDVRKMIAKSEQEIGKATAKYFFYSNIMNFFKTEITLANGEIRKRPLIETNGETGEIVWDKGRDFATVRKVLSMPQVNIVKKTEVQTGGFSKESILPKRNSDKLIARKKDWDPKKYGGFDSPTVAYSVLVVAKVEKGKSKKLKSVKELLGITIMERSSFEKNPIDFLEAKGYKEVKKDLIIKLPKYSLFELENGRKRMLASAGELQKGNELALPSKYVNFLYLASHYEKLKGSPEDNEQKQLFVEQHKHYLDEIIEQISEFSKRVILADANLDKVLSAYNKHRDKPIREQAENIIHLFTLTNLGAPAAFKYFDTTIDRKRYTSTKEVLDATLIHQSITGLYETRIDLSQLGGDGGGGSEAAAKPAPGGTLGDQGSRGSDPLPEPRVTLTVEGIPTEFLVNTGAEHSVLTKPMGKMGSKRTVVAGATGSKVYPWTTKRLLKIGQKQVTHSFLVIPECPAPLLGRDLLTKLKAQIQFSTEGPQVTWEDRPAMCLVLNLEEEYRLHEKPVPPSIDPSWLQLFPMVWAEKAGMGLANQVPPVVVELKSDASPVAVRQYPMSKEAREGIRPHIQRFLDLGILVPCQSPWNTPLLPVKKPGTNDYRPVQDLREVNKRVQDIHPTVPNPYNLLSSLPPSHTWYSVLDLKDAFFCLKLHPNSQPLFAFEWRDPEKGNTGQLTWTRLPQGFKNSPTLFNEALHRDLASFRALNPQVVMLQYVDDLLVAAPTYRDCKEGTRRLLQELSKLGYRVSAKKAQLCREEVTYLGYLLKGGKRWLTPARKATVMKIPTPTTPRQVREFLGKAGFCRLFIPGFASLAAPLYPLTRPKVPFTWTEAHQEAFGRIKEALLSAPALALPDLTKPFALYVDEKEGVARGVLTQTLGPWRRPVAYLSKKLDPVASGWPTCLKAIAAVALLLKDADKLTLGQNVLVIAPHNLESIVRQPPDRWMTNARMTHYQSLLLNERVSFAPPAILNPATLLPVESDDTPIHICSEILAEETGTRPDLRDQPLPGVPAWYTDGSSFIMDGRRQAGAAIVDNKRTVWASNLPEGTSAQKAELIALTQALRLAEGKSINIYTDSRYAFATAHVHGAIYKQRGWLTSAGKDIKNKEEILALLEAIHLPKRVAIIHCPGHQRGTDPVATGNRKADEAAKQAAQSTRILTETTKNAGKRTADGSEFEKRTADGSEFESPKKKAKVE

SEQ ID NO: 7198 - protein, 2096 aa, synthetic construct
MPAAKRVKLDGGDKKYSIGLDIGTNSVGWAVITDEYKVPSKKFKVLGNTDRHSIKKNLIGALLFDSGETAEATRLKRTARRRYTRRKNRICYLQEIFSNEMAKVDDSFFHRLEESFLVEEDKKHERHPIFGNIVDEVAYHEKYPTIYHLRKKLVDSTDKADLRLIYLALAHMIKFRGHFLIEGDLNPDNSDVDKLFIQLVQTYNQLFEENPINASGVDAKAILSARLSKSRRLENLIAQLPGEKKNGLFGNLIALSLGLTPNFKSNFDLAEDAKLQLSKDTYDDDLDNLLAQIGDQYADLFLAAKNLSDAILLSDILRVNTEITKAPLSASMIKRYDEHHQDLTLLKALVRQQLPEKYKEIFFDQSKNGYAGYIDGGASQEEFYKFIKPILEKMDGTEELLVKLNREDLLRKQRTFDNGSIPHQIHLGELHAILRRQEDFYPFLKDNREKIEKILTFRIPYYVGPLARGNSRFAWMTRKSEETITPWNFEEVVDKGASAQSFIERMTNFDKNLPNEKVLPKHSLLYEYFTVYNELTKVKYVTEGMRKPAFLSGEQKKAIVDLLFKTNRKVTVKQLKEDYFKKIECFDSVEISGVEDRFNASLGTYHDLLKIIKDKDFLDNEENEDILEDIVLTLTLFEDREMIEERLKTYAHLFDDKVMKQLKRRRYTGWGRLSRKLINGIRDKQSGKTILDFLKSDGFANRNFMQLIHDDSLTFKEDIQKAQVSGQGDSLHEHIANLAGSPAIKKGILQTVKVVDELVKVMGRHKPENIVIEMARENQTTQKGQKNSRERMKRIEEGIKELGSQILKEHPVENTQLQNEKLYLYYLQNGRDMYVDQELDINRLSDYDVDHIVPQSFLKDDSIDNKVLTRSDKARGKSDNVPSEEVVKKMKNYWRQLLNAKLITQRKFDNLTKAERGGLSELDKAGFIKRQLVETRQITKHVAQILDSRMNTKYDENDKLIREVKVITLKSKLVSDFRKDFQFYKVREINNYHHAHDAYLNAVVGTALIKKYPKLESEFVYGDYKVYDVRKMIAKSEQEIGKATAKYFFYSNIMNFFKTEITLANGEIRKRPLIETNGETGEIVWDKGRDFATVRKVLSMPQVNIVKKTEVQTGGFSKESILPKRNSDKLIARKKDWDPKKYGGFDSPTVAYSVLVVAKVEKGKSKKLKSVKELLGITIMERSSFEKNPIDFLEAKGYKEVKKDLIIKLPKYSLFELENGRKRMLASAGELQKGNELALPSKYVNFLYLASHYEKLKGSPEDNEQKQLFVEQHKHYLDEIIEQISEFSKRVILADANLDKVLSAYNKHRDKPIREQAENIIHLFTLTNLGAPAAFKYFDTTIDRKRYTSTKEVLDATLIHQSITGLYETRIDLSQLGGDGGGGSEAAAKPAPGGTLNLEDEYRLYETSAEPEVSPGSTWLSDFPQAWAETGGMGLAVRQAPLIIPLKATSTPVSIKQYPMSQEAKLGIKPHIQRLLDQGILVPCQSPWNTPLLPVKKPGTNDYRPVQDLREVNKRVEDIHPTVPNPYNLLSGLPPSHRWYTVLDLKDAFFCLRLHPTSQPLFAFEWRDPGMGISGQLTWTRLPQGFKNSPTLFNEALHRDLADFRIQHPDLILLQYVDDILLAATSELDCQQGTRALLLTLGNLGYRASAKKAQLCQKQVKYLGYLLKEGQRWLTEARKETVMGQPTPKTPRQLREFLGKAGFCRLFIPGFAEMAAPLYPLTKPGTLFNWGPDQQKAYQEIKQALLTAPALGLPDLTKPFELFVDEKQGYAKGVLTQKLGPWRRPVAYLSKKLDPVAAGWPPCLRMVAAIAVLRKDAGKLTMGQPLVILAPHAVEALVKQPPDRWLSNARMTHYQAMLLDTDRVQFGPVVALNPATLLPLPEEGAPHDCLEILAETHGTRPDLTDQPIPDADHTWYTDGSSFLQEGQRKAGAAVTTETEVIWARALPAGTSAQRAELIALTQALKMAEGKRLNVYTDSRYAFATAHIHGEIYRRRGWLTSEGREIKNKSEILALLKALFLPKRLSIIHCLGHQKGDSAEARGNRLADQAAREAAIKTPPDTSTLLAGKRTADGSEFEKRTADGSEFESPKKKAKVE

SEQ ID NO: 7199 - protein, 2096 aa, synthetic construct
MPAAKRVKLDGGDKKYSIGLDIGTNSVGWAVITDEYKVPSKKFKVLGNTDRHSIKKNLIGALLFDSGETAEATRLKRTARRRYTRRKNRICYLQEIFSNEMAKVDDSFFHRLEESFLVEEDKKHERHPIFGNIVDEVAYHEKYPTIYHLRKKLVDSTDKADLRLIYLALAHMIKFRGHFLIEGDLNPDNSDVDKLFIQLVQTYNQLFEENPINASGVDAKAILSARLSKSRRLENLIAQLPGEKKNGLFGNLIALSLGLTPNFKSNFDLAEDAKLQLSKDTYDDDLDNLLAQIGDQYADLFLAAKNLSDAILLSDILRVNTEITKAPLSASMIKRYDEHHQDLTLLKALVRQQLPEKYKEIFFDQSKNGYAGYIDGGASQEEFYKFIKPILEKMDGTEELLVKLNREDLLRKQRTFDNGSIPHQIHLGELHAILRRQEDFYPFLKDNREKIEKILTFRIPYYVGPLARGNSRFAWMTRKSEETITPWNFEEVVDKGASAQSFIERMTNFDKNLPNEKVLPKHSLLYEYFTVYNELTKVKYVTEGMRKPAFLSGEQKKAIVDLLFKTNRKVTVKQLKEDYFKKIECFDSVEISGVEDRFNASLGTYHDLLKIIKDKDFLDNEENEDILEDIVLTLTLFEDREMIEERLKTYAHLFDDKVMKQLKRRRYTGWGRLSRKLINGIRDKQSGKTILDFLKSDGFANRNFMQLIHDDSLTFKEDIQKAQVSGQGDSLHEHIANLAGSPAIKKGILQTVKVVDELVKVMGRHKPENIVIEMARENQTTQKGQKNSRERMKRIEEGIKELGSQILKEHPVENTQLQNEKLYLYYLQNGRDMYVDQELDINRLSDYDVDHIVPQSFLKDDSIDNKVLTRSDKARGKSDNVPSEEVVKKMKNYWRQLLNAKLITQRKFDNLTKAERGGLSELDKAGFIKRQLVETRQITKHVAQILDSRMNTKYDENDKLIREVKVITLKSKLVSDFRKDFQFYKVREINNYHHAHDAYLNAVVGTALIKKYPKLESEFVYGDYKVYDVRKMIAKSEQEIGKATAKYFFYSNIMNFFKTEITLANGEIRKRPLIETNGETGEIVWDKGRDFATVRKVLSMPQVNIVKKTEVQTGGFSKESILPKRNSDKLIARKKDWDPKKYGGFDSPTVAYSVLVVAKVEKGKSKKLKSVKELLGITIMERSSFEKNPIDFLEAKGYKEVKKDLIIKLPKYSLFELENGRKRMLASAGELQKGNELALPSKYVNFLYLASHYEKLKGSPEDNEQKQLFVEQHKHYLDEIIEQISEFSKRVILADANLDKVLSAYNKHRDKPIREQAENIIHLFTLTNLGAPAAFKYFDTTIDRKRYTSTKEVLDATLIHQSITGLYETRIDLSQLGGDGGGGSEAAAKPAPGGTLNIEDEYRLHETSKGPDVPLGSTWLSDFPQAWAETGGMGLAFRQAPLIISLKATSTPVSIKQYPMSQEARLGIKPHIQRLLDQGILVPCQSPWNTPLLPVKKPGTNDYRPVQDLREVNKRVEDIHPTVPNPYNLLSGLPPSHQWYTVLDLKDAFFCLRLHPTSQSLFAFEWKDPEMGISGQLTWTRLPQGFKNSPTLFNEALHRDLADFRIQHPDLILLQYVDDLLLAATSELDCQQGTRALLQTLGDLGYRASAKKAQICQKQVKYLGYLLKEGQRWLTEARKETVMGQPTPKTPRQLREFLGKAGLCRLFIPGFAEMAAPLYPLTKPGTLFKWGPDQQKAYQEIKQALLTAPALGLPDLTKPFELFVDEKQGYAKGVLTQKLGPWRRPVAYLSKKLDPVAAGWPPCLRMVAAIAVLTKDVGKLTMGQPLVILAPHAVEALVKQPPDRWLSNARMTHYQALLLDTDRVQFGPIVALNPATLLPLPEEGLQHDCLDILAEAHGTRPDLTDQPLPDADHTWYTDGSSFLQEGQRRAGAAVTTETEVIWAKALPAGTSAQRAELIALTQALKMAAGKKLNVYTDSRYAFATAHIHGEIYRRRGWLTSEGKEIKNKDEILALLKALFLPKRLSIIHCPGHQKGNHAEARGNRMADQAAREVATRETPETSTLLAGKRTADGSEFEKRTADGSEFESPKKKAKVE

SEQ ID NO: 7200 - protein, 2096 aa, synthetic construct
MPAAKRVKLDGGDKKYSIGLDIGTNSVGWAVITDEYKVPSKKFKVLGNTDRHSIKKNLIGALLFDSGETAEATRLKRTARRRYTRRKNRICYLQEIFSNEMAKVDDSFFHRLEESFLVEEDKKHERHPIFGNIVDEVAYHEKYPTIYHLRKKLVDSTDKADLRLIYLALAHMIKFRGHFLIEGDLNPDNSDVDKLFIQLVQTYNQLFEENPINASGVDAKAILSARLSKSRRLENLIAQLPGEKKNGLFGNLIALSLGLTPNFKSNFDLAEDAKLQLSKDTYDDDLDNLLAQIGDQYADLFLAAKNLSDAILLSDILRVNTEITKAPLSASMIKRYDEHHQDLTLLKALVRQQLPEKYKEIFFDQSKNGYAGYIDGGASQEEFYKFIKPILEKMDGTEELLVKLNREDLLRKQRTFDNGSIPHQIHLGELHAILRRQEDFYPFLKDNREKIEKILTFRIPYYVGPLARGNSRFAWMTRKSEETITPWNFEEVVDKGASAQSFIERMTNFDKNLPNEKVLPKHSLLYEYFTVYNELTKVKYVTEGMRKPAFLSGEQKKAIVDLLFKTNRKVTVKQLKEDYFKKIECFDSVEISGVEDRFNASLGTYHDLLKIIKDKDFLDNEENEDILEDIVLTLTLFEDREMIEERLKTYAHLFDDKVMKQLKRRRYTGWGRLSRKLINGIRDKQSGKTILDFLKSDGFANRNFMQLIHDDSLTFKEDIQKAQVSGQGDSLHEHIANLAGSPAIKKGILQTVKVVDELVKVMGRHKPENIVIEMARENQTTQKGQKNSRERMKRIEEGIKELGSQILKEHPVENTQLQNEKLYLYYLQNGRDMYVDQELDINRLSDYDVDHIVPQSFLKDDSIDNKVLTRSDKARGKSDNVPSEEVVKKMKNYWRQLLNAKLITQRKFDNLTKAERGGLSELDKAGFIKRQLVETRQITKHVAQILDSRMNTKYDENDKLIREVKVITLKSKLVSDFRKDFQFYKVREINNYHHAHDAYLNAVVGTALIKKYPKLESEFVYGDYKVYDVRKMIAKSEQEIGKATAKYFFYSNIMNFFKTEITLANGEIRKRPLIETNGETGEIVWDKGRDFATVRKVLSMPQVNIVKKTEVQTGGFSKESILPKRNSDKLIARKKDWDPKKYGGFDSPTVAYSVLVVAKVEKGKSKKLKSVKELLGITIMERSSFEKNPIDFLEAKGYKEVKKDLIIKLPKYSLFELENGRKRMLASAGELQKGNELALPSKYVNFLYLASHYEKLKGSPEDNEQKQLFVEQHKHYLDEIIEQISEFSKRVILADANLDKVLSAYNKHRDKPIREQAENIIHLFTLTNLGAPAAFKYFDTTIDRKRYTSTKEVLDATLIHQSITGLYETRIDLSQLGGDGGGGSEAAAKPAPGGTLNIEDEHRLHETSKEPDVSLGSTWLSDFPQAWAETGGMGLAVRQAPLIIPLKATSTPVSIKQYPMSQEARLGIKPHIQRLLDQGILVPCQSPWNTPLLPVKKPGTNDYRPVQDLREVNKRVEDIHPTVPNPYNLLSGLPPSHQWYTVLDLKDAFFCLRLHPTSQPLFAFEWRDPEMGISGQLTWTRLPQGFKNSPTLFDEALHRDLADFRIQHPDLILLQYVDDLLLAATSELDCQQGTRALLQTLGNLGYRASAKKAQICQKQVKYLGYLLKEGQRWLTEARKETVMGQPTPKTPRQLREFLGTAGFCRLWIPGFAEMAAPLYPLTKTGTLFNWGPDQQKAYQEIKQALLTAPALGLPDLTKPFELFVDEKQGYAKGVLTQKLGPWRRPVAYLSKKLDPVAAGWPPCLRMVAAIAVLTKDAGKLTMGQPLVILAPHAVEALVKQPPDRWLSNARMTHYQALLLDTDRVQFGPVVALNPATLLPLPEEGLQHNCLDILAEAHGTRPDLTDQPLPDADHTWYTDGSSLLQEGQRKAGAAVTTETEVIWAKALPAGTSAQRAELIALTQALKMAEGKKLNVYTDSRYAFATAHIHGEIYRRRGLLTSEGKEIKNKDEILALLKALFLPKRLSIIHCPGHQKGHSAEARGNRMADQAARKAAITETPDTSTLLAGKRTADGSEFEKRTADGSEFESPKKKAKVE

SEQ ID NO: 7201 - protein, 2090 aa, synthetic construct
MPAAKRVKLDGGDKKYSIGLDIGTNSVGWAVITDEYKVPSKKFKVLGNTDRHSIKKNLIGALLFDSGETAEATRLKRTARRRYTRRKNRICYLQEIFSNEMAKVDDSFFHRLEESFLVEEDKKHERHPIFGNIVDEVAYHEKYPTIYHLRKKLVDSTDKADLRLIYLALAHMIKFRGHFLIEGDLNPDNSDVDKLFIQLVQTYNQLFEENPINASGVDAKAILSARLSKSRRLENLIAQLPGEKKNGLFGNLIALSLGLTPNFKSNFDLAEDAKLQLSKDTYDDDLDNLLAQIGDQYADLFLAAKNLSDAILLSDILRVNTEITKAPLSASMIKRYDEHHQDLTLLKALVRQQLPEKYKEIFFDQSKNGYAGYIDGGASQEEFYKFIKPILEKMDGTEELLVKLNREDLLRKQRTFDNGSIPHQIHLGELHAILRRQEDFYPFLKDNREKIEKILTFRIPYYVGPLARGNSRFAWMTRKSEETITPWNFEEVVDKGASAQSFIERMTNFDKNLPNEKVLPKHSLLYEYFTVYNELTKVKYVTEGMRKPAFLSGEQKKAIVDLLFKTNRKVTVKQLKEDYFKKIECFDSVEISGVEDRFNASLGTYHDLLKIIKDKDFLDNEENEDILEDIVLTLTLFEDREMIEERLKTYAHLFDDKVMKQLKRRRYTGWGRLSRKLINGIRDKQSGKTILDFLKSDGFANRNFMQLIHDDSLTFKEDIQKAQVSGQGDSLHEHIANLAGSPAIKKGILQTVKVVDELVKVMGRHKPENIVIEMARENQTTQKGQKNSRERMKRIEEGIKELGSQILKEHPVENTQLQNEKLYLYYLQNGRDMYVDQELDINRLSDYDVDHIVPQSFLKDDSIDNKVLTRSDKARGKSDNVPSEEVVKKMKNYWRQLLNAKLITQRKFDNLTKAERGGLSELDKAGFIKRQLVETRQITKHVAQILDSRMNTKYDENDKLIREVKVITLKSKLVSDFRKDFQFYKVREINNYHHAHDAYLNAVVGTALIKKYPKLESEFVYGDYKVYDVRKMIAKSEQEIGKATAKYFFYSNIMNFFKTEITLANGEIRKRPLIETNGETGEIVWDKGRDFATVRKVLSMPQVNIVKKTEVQTGGFSKESILPKRNSDKLIARKKDWDPKKYGGFDSPTVAYSVLVVAKVEKGKSKKLKSVKELLGITIMERSSFEKNPIDFLEAKGYKEVKKDLIIKLPKYSLFELENGRKRMLASAGELQKGNELALPSKYVNFLYLASHYEKLKGSPEDNEQKQLFVEQHKHYLDEIIEQISEFSKRVILADANLDKVLSAYNKHRDKPIREQAENIIHLFTLTNLGAPAAFKYFDTTIDRKRYTSTKEVLDATLIHQSITGLYETRIDLSQLGGDGGGGSEAAAKPAPGGTLQLDDEYRLYSPLVKPDQNIQFWLEQFPQAWAETAGMGLAKQVPPQVIQLKASATPVSVRQYPLSKEAQEGIRPHVQRLIQQGILVPVQSPWNTPLLPVRKPGTNDYRPVQDLREVNKRVQDIHPTVPNPYNLLCALPPQRSWYTVLDLKDAFFCLRLHPTSQPLFAFEWRDPGTGRTGQLTWTRLPQGFKNSPTIFDEALHRDLANFRIQHPQVTLLQYVDDLLLAGATKQDCLEGTKALLLELSDLGYRASAKKAQICRREVTYLGYSLRDGQRWLTEARKKTVVQIPAPTTAKQVREFLGTAGFCRLWIPGFATLAAPLYPLTKEKGEFSWAPEHQKAFDAIKKALLSAPALALPDVTKPFTLYVDERKGVARGVLTQTLGPWRRPVAYLSKKLDPVASGWPVCLKAIAAVAILVKDADKLTLGQNITVIAPHALENIVRQPPDRWMTNARMTHYQSLLLTERVTFAPPAALNPATLLPEETDEPVTHDCHQLLIEETGVRKDLTDIPLTGEVLTWFTDGSSYVVEGKRMAGAAVVDGTRTIWASSLPEGTSAQKAELMALTQALRLAEGKSINIYTDSRYAFATAHVHGAIYKQRGLLTSAGREIKNKEEILSLLEALHLPKRLAIIHCPGHQKAKDPISRGNQMADRVAKQAAQGVNLLAGKRTADGSEFEKRTADGSEFESPKKKAKVE

SEQ ID NO: 7202 - protein, 2096 aa, synthetic construct
MPAAKRVKLDGGDKKYSIGLDIGTNSVGWAVITDEYKVPSKKFKVLGNTDRHSIKKNLIGALLFDSGETAEATRLKRTARRRYTRRKNRICYLQEIFSNEMAKVDDSFFHRLEESFLVEEDKKHERHPIFGNIVDEVAYHEKYPTIYHLRKKLVDSTDKADLRLIYLALAHMIKFRGHFLIEGDLNPDNSDVDKLFIQLVQTYNQLFEENPINASGVDAKAILSARLSKSRRLENLIAQLPGEKKNGLFGNLIALSLGLTPNFKSNFDLAEDAKLQLSKDTYDDDLDNLLAQIGDQYADLFLAAKNLSDAILLSDILRVNTEITKAPLSASMIKRYDEHHQDLTLLKALVRQQLPEKYKEIFFDQSKNGYAGYIDGGASQEEFYKFIKPILEKMDGTEELLVKLNREDLLRKQRTFDNGSIPHQIHLGELHAILRRQEDFYPFLKDNREKIEKILTFRIPYYVGPLARGNSRFAWMTRKSEETITPWNFEEVVDKGASAQSFIERMTNFDKNLPNEKVLPKHSLLYEYFTVYNELTKVKYVTEGMRKPAFLSGEQKKAIVDLLFKTNRKVTVKQLKEDYFKKIECFDSVEISGVEDRFNASLGTYHDLLKIIKDKDFLDNEENEDILEDIVLTLTLFEDREMIEERLKTYAHLFDDKVMKQLKRRRYTGWGRLSRKLINGIRDKQSGKTILDFLKSDGFANRNFMQLIHDDSLTFKEDIQKAQVSGQGDSLHEHIANLAGSPAIKKGILQTVKVVDELVKVMGRHKPENIVIEMARENQTTQKGQKNSRERMKRIEEGIKELGSQILKEHPVENTQLQNEKLYLYYLQNGRDMYVDQELDINRLSDYDVDHIVPQSFLKDDSIDNKVLTRSDKARGKSDNVPSEEVVKKMKNYWRQLLNAKLITQRKFDNLTKAERGGLSELDKAGFIKRQLVETRQITKHVAQILDSRMNTKYDENDKLIREVKVITLKSKLVSDFRKDFQFYKVREINNYHHAHDAYLNAVVGTALIKKYPKLESEFVYGDYKVYDVRKMIAKSEQEIGKATAKYFFYSNIMNFFKTEITLANGEIRKRPLIETNGETGEIVWDKGRDFATVRKVLSMPQVNIVKKTEVQTGGFSKESILPKRNSDKLIARKKDWDPKKYGGFDSPTVAYSVLVVAKVEKGKSKKLKSVKELLGITIMERSSFEKNPIDFLEAKGYKEVKKDLIIKLPKYSLFELENGRKRMLASAGELQKGNELALPSKYVNFLYLASHYEKLKGSPEDNEQKQLFVEQHKHYLDEIIEQISEFSKRVILADANLDKVLSAYNKHRDKPIREQAENIIHLFTLTNLGAPAAFKYFDTTIDRKRYTSTKEVLDATLIHQSITGLYETRIDLSQLGGDGGGGSEAAAKPAPGGTLNIEDEYRLHETSKEPDVPLGSTWLSDFPQAWAETGGMGLAVRQAPLIIPLKATSTPVSIKQYPMSQEARLGIKPHIQRLLDQGILVPCQSPWNTPLLPVKKPGTNDYRPVQDLREVNKRVEDIHPTVPNPYNLLSGLPPSHQWYTVLDLKDAFFCLRLHPTSQPLFAFEWRDPEMGISGQLTWTRLPQGFKNSPTLFDEALHRDLADFRIQHPDLILLQYVDDLLLAATSEQDCQRGTRALLQTLGNLGYRASAKKAQICQKQVKYLGYLLKEGQRWLTEARKETVMGQPTPKTPRQLREFLGTAGFCRLWIPGFAEMAAPLYPLTKTGTLFNWGPDQQKAYQEIKQALLTAPALGLPDLTKPFELFVDEKQGYAKGVLTQKLGPWRRPVAYLSKKLDPVAAGWPPCLRMVAAIAVLTKDAGKLTMGQPLVILAPHAVEALVKQPPDRWLSNARMTHYQAMLLDTDRVQFGPVVALNPATLLPLPEKEAPHDCLEILAETHGTRPDLTDQPIPDADYTWYTDGSSFLQEGQRRAGAAVTTETEVIWARALPAGTSAQRAELIALTQALKMAEGKKLNVYTDSRYAFATAHVHGEIYRRRGLLTSEGREIKNKNEILALLKALFLPKRLSIIHCPGHQKGNSAEARGNRMADQAAREAAMKAVLETSTLLAGKRTADGSEFEKRTADGSEFESPKKKAKVE

SEQ ID NO: 7203 - protein, 2096 aa, synthetic construct
MPAAKRVKLDGGDKKYSIGLDIGTNSVGWAVITDEYKVPSKKFKVLGNTDRHSIKKNLIGALLFDSGETAEATRLKRTARRRYTRRKNRICYLQEIFSNEMAKVDDSFFHRLEESFLVEEDKKHERHPIFGNIVDEVAYHEKYPTIYHLRKKLVDSTDKADLRLIYLALAHMIKFRGHFLIEGDLNPDNSDVDKLFIQLVQTYNQLFEENPINASGVDAKAILSARLSKSRRLENLIAQLPGEKKNGLFGNLIALSLGLTPNFKSNFDLAEDAKLQLSKDTYDDDLDNLLAQIGDQYADLFLAAKNLSDAILLSDILRVNTEITKAPLSASMIKRYDEHHQDLTLLKALVRQQLPEKYKEIFFDQSKNGYAGYIDGGASQEEFYKFIKPILEKMDGTEELLVKLNREDLLRKQRTFDNGSIPHQIHLGELHAILRRQEDFYPFLKDNREKIEKILTFRIPYYVGPLARGNSRFAWMTRKSEETITPWNFEEVVDKGASAQSFIERMTNFDKNLPNEKVLPKHSLLYEYFTVYNELTKVKYVTEGMRKPAFLSGEQKKAIVDLLFKTNRKVTVKQLKEDYFKKIECFDSVEISGVEDRFNASLGTYHDLLKIIKDKDFLDNEENEDILEDIVLTLTLFEDREMIEERLKTYAHLFDDKVMKQLKRRRYTGWGRLSRKLINGIRDKQSGKTILDFLKSDGFANRNFMQLIHDDSLTFKEDIQKAQVSGQGDSLHEHIANLAGSPAIKKGILQTVKVVDELVKVMGRHKPENIVIEMARENQTTQKGQKNSRERMKRIEEGIKELGSQILKEHPVENTQLQNEKLYLYYLQNGRDMYVDQELDINRLSDYDVDHIVPQSFLKDDSIDNKVLTRSDKARGKSDNVPSEEVVKKMKNYWRQLLNAKLITQRKFDNLTKAERGGLSELDKAGFIKRQLVETRQITKHVAQILDSRMNTKYDENDKLIREVKVITLKSKLVSDFRKDFQFYKVREINNYHHAHDAYLNAVVGTALIKKYPKLESEFVYGDYKVYDVRKMIAKSEQEIGKATAKYFFYSNIMNFFKTEITLANGEIRKRPLIETNGETGEIVWDKGRDFATVRKVLSMPQVNIVKKTEVQTGGFSKESILPKRNSDKLIARKKDWDPKKYGGFDSPTVAYSVLVVAKVEKGKSKKLKSVKELLGITIMERSSFEKNPIDFLEAKGYKEVKKDLIIKLPKYSLFELENGRKRMLASAGELQKGNELALPSKYVNFLYLASHYEKLKGSPEDNEQKQLFVEQHKHYLDEIIEQISEFSKRVILADANLDKVLSAYNKHRDKPIREQAENIIHLFTLTNLGAPAAFKYFDTTIDRKRYTSTKEVLDATLIHQSITGLYETRIDLSQLGGDGGGGSEAAAKPAPGGTLNIEDEYRLHETSKEPDVPLGSTWLSDFPQAWAETGGMGLAVRQAPLIIPLKATSTPVSIKQYPMSQEARLGIKPHIQRLLDQGILVPCQSPWNTPLLPVKKPGTNDYRPVQDLREVNKRVEDIHPTVPNPYNLLSGLPPSHQWYTVLDLKDAFFCLRLHPTSQPLFAFEWRDPEMGISGQLTWTRLPQGFKNSPTLFNEALHRDLADFRIQHPDLILLQYVDDLLLAATSEQDCQRGTRALLQTLGNLGYRASAKKAQICQKQVKYLGYLLKEGQRWLTEARKETVMGQPTPKTPRQLREFLGTAGFCRLWIPGFAEMAAPLYPLTKPGTLFNWGPDQQKAYQEIKQALLTAPALGLPDLTKPFELFVDEKQGYAKGVLTQKLGPWRRPVAYLSKKLDPVAAGWPPCLRMVAAIAVLTKDAGKLTMGQPLVILAPHAVEALVKQPPDRWLSNARMTHYQAMLLDTDRVQFGPVVALNPATLLPLPEKEAPHDCLEILAETHGTRPDLTDQPIPDADYTWYTDGSSFLQEGQRRAGAAVTTETEVIWARALPAGTSAQRAELIALTQALKMAEGKKLNVYTDSRYAFATAHVHGEIYRRRGWLTSEGREIKNKNEILALLKALFLPKRLSIIHCPGHQKGNSAEARGNRMADQAAREAAMKAVLETSTLLAGKRTADGSEFEKRTADGSEFESPKKKAKVE

SEQ ID NO: 7204 - protein, 2098 aa, synthetic construct
MPAAKRVKLDGGDKKYSIGLDIGTNSVGWAVITDEYKVPSKKFKVLGNTDRHSIKKNLIGALLFDSGETAEATRLKRTARRRYTRRKNRICYLQEIFSNEMAKVDDSFFHRLEESFLVEEDKKHERHPIFGNIVDEVAYHEKYPTIYHLRKKLVDSTDKADLRLIYLALAHMIKFRGHFLIEGDLNPDNSDVDKLFIQLVQTYNQLFEENPINASGVDAKAILSARLSKSRRLENLIAQLPGEKKNGLFGNLIALSLGLTPNFKSNFDLAEDAKLQLSKDTYDDDLDNLLAQIGDQYADLFLAAKNLSDAILLSDILRVNTEITKAPLSASMIKRYDEHHQDLTLLKALVRQQLPEKYKEIFFDQSKNGYAGYIDGGASQEEFYKFIKPILEKMDGTEELLVKLNREDLLRKQRTFDNGSIPHQIHLGELHAILRRQEDFYPFLKDNREKIEKILTFRIPYYVGPLARGNSRFAWMTRKSEETITPWNFEEVVDKGASAQSFIERMTNFDKNLPNEKVLPKHSLLYEYFTVYNELTKVKYVTEGMRKPAFLSGEQKKAIVDLLFKTNRKVTVKQLKEDYFKKIECFDSVEISGVEDRFNASLGTYHDLLKIIKDKDFLDNEENEDILEDIVLTLTLFEDREMIEERLKTYAHLFDDKVMKQLKRRRYTGWGRLSRKLINGIRDKQSGKTILDFLKSDGFANRNFMQLIHDDSLTFKEDIQKAQVSGQGDSLHEHIANLAGSPAIKKGILQTVKVVDELVKVMGRHKPENIVIEMARENQTTQKGQKNSRERMKRIEEGIKELGSQILKEHPVENTQLQNEKLYLYYLQNGRDMYVDQELDINRLSDYDVDHIVPQSFLKDDSIDNKVLTRSDKARGKSDNVPSEEVVKKMKNYWRQLLNAKLITQRKFDNLTKAERGGLSELDKAGFIKRQLVETRQITKHVAQILDSRMNTKYDENDKLIREVKVITLKSKLVSDFRKDFQFYKVREINNYHHAHDAYLNAVVGTALIKKYPKLESEFVYGDYKVYDVRKMIAKSEQEIGKATAKYFFYSNIMNFFKTEITLANGEIRKRPLIETNGETGEIVWDKGRDFATVRKVLSMPQVNIVKKTEVQTGGFSKESILPKRNSDKLIARKKDWDPKKYGGFDSPTVAYSVLVVAKVEKGKSKKLKSVKELLGITIMERSSFEKNPIDFLEAKGYKEVKKDLIIKLPKYSLFELENGRKRMLASAGELQKGNELALPSKYVNFLYLASHYEKLKGSPEDNEQKQLFVEQHKHYLDEIIEQISEFSKRVILADANLDKVLSAYNKHRDKPIREQAENIIHLFTLTNLGAPAAFKYFDTTIDRKRYTSTKEVLDATLIHQSITGLYETRIDLSQLGGDGGGGSPAPEAAAKGGTAPLEEEYRLFLEAPIQNVTLLEQWKREIPKVWAEINPPGLASTQAPIHVQLLSTALPVRVRQYPITLEAKRSLRETIRKFRAAGILRPVHSPWNTPLLPVRKSGTSEYRMVQDLREVNKRVETIHPTVPNPYTLLSLLPPDRIWYSVLDLKDAFFCIPLAPESQLIFAFEWADAEEGESGQLTWTRLPQGFKNSPTLFNEALNRDLQGFRLDHPSVSLLQYVDDLLIAADTQAACLSATRDLLMTLAELGYRVSGKKAQLCQEEVTYLGFKIHKGSRSLSNSRTQAILQIPVPKTKRQVREFLGKIGYCRLFIPGFAELAQPLYAATRPGNDPLVWGEKEEEAFQSLKLALTQPPALALPSLDKPFQLFVEETSGAAKGVLTQALGPWKRPVAYLSKRLDPVAAGWPRCLRAIAAAALLTREASKLTFGQDIEITSSHNLESLLRSPPDKWLTNARITQYQVLLLDPPRVRFKQTAALNPATLLPETDDTLPIHHCLDTLDSLTSTRPDLTDQPLAQAEATLFTDGSSYIRDGKRYAGAAVVTLDSVIWAEPLPIGTSAQKAELIALTKALEWSKDKSVNIYTDSRYAFATLHVHGMIYRERGWLTAGGKAIKNAPEILALLTAVWLPKRVAVMHCKGHQKDDAPTSTGNRRADEVAREVAIRPLSTQATISAGKRTADGSEFEKRTADGSEFESPKKKAKVE

SEQ ID NO: 7205 - protein, 2218 aa, synthetic construct
MPAAKRVKLDGGDKKYSIGLDIGTNSVGWAVITDEYKVPSKKFKVLGNTDRHSIKKNLIGALLFDSGETAEATRLKRTARRRYTRRKNRICYLQEIFSNEMAKVDDSFFHRLEESFLVEEDKKHERHPIFGNIVDEVAYHEKYPTIYHLRKKLVDSTDKADLRLIYLALAHMIKFRGHFLIEGDLNPDNSDVDKLFIQLVQTYNQLFEENPINASGVDAKAILSARLSKSRRLENLIAQLPGEKKNGLFGNLIALSLGLTPNFKSNFDLAEDAKLQLSKDTYDDDLDNLLAQIGDQYADLFLAAKNLSDAILLSDILRVNTEITKAPLSASMIKRYDEHHQDLTLLKALVRQQLPEKYKEIFFDQSKNGYAGYIDGGASQEEFYKFIKPILEKMDGTEELLVKLNREDLLRKQRTFDNGSIPHQIHLGELHAILRRQEDFYPFLKDNREKIEKILTFRIPYYVGPLARGNSRFAWMTRKSEETITPWNFEEVVDKGASAQSFIERMTNFDKNLPNEKVLPKHSLLYEYFTVYNELTKVKYVTEGMRKPAFLSGEQKKAIVDLLFKTNRKVTVKQLKEDYFKKIECFDSVEISGVEDRFNASLGTYHDLLKIIKDKDFLDNEENEDILEDIVLTLTLFEDREMIEERLKTYAHLFDDKVMKQLKRRRYTGWGRLSRKLINGIRDKQSGKTILDFLKSDGFANRNFMQLIHDDSLTFKEDIQKAQVSGQGDSLHEHIANLAGSPAIKKGILQTVKVVDELVKVMGRHKPENIVIEMARENQTTQKGQKNSRERMKRIEEGIKELGSQILKEHPVENTQLQNEKLYLYYLQNGRDMYVDQELDINRLSDYDVDHIVPQSFLKDDSIDNKVLTRSDKARGKSDNVPSEEVVKKMKNYWRQLLNAKLITQRKFDNLTKAERGGLSELDKAGFIKRQLVETRQITKHVAQILDSRMNTKYDENDKLIREVKVITLKSKLVSDFRKDFQFYKVREINNYHHAHDAYLNAVVGTALIKKYPKLESEFVYGDYKVYDVRKMIAKSEQEIGKATAKYFFYSNIMNFFKTEITLANGEIRKRPLIETNGETGEIVWDKGRDFATVRKVLSMPQVNIVKKTEVQTGGFSKESILPKRNSDKLIARKKDWDPKKYGGFDSPTVAYSVLVVAKVEKGKSKKLKSVKELLGITIMERSSFEKNPIDFLEAKGYKEVKKDLIIKLPKYSLFELENGRKRMLASAGELQKGNELALPSKYVNFLYLASHYEKLKGSPEDNEQKQLFVEQHKHYLDEIIEQISEFSKRVILADANLDKVLSAYNKHRDKPIREQAENIIHLFTLTNLGAPAAFKYFDTTIDRKRYTSTKEVLDATLIHQSITGLYETRIDLSQLGGDGGGGSPAPEAAAKGGTLGDQGSRGSDPLPEPRVTLTVEGIPTEFLVNTGAEHSVLTKPMGKMGSKRTVVAGATGSKVYPWTTKRLLKIGQKQVTHSFLVIPECPAPLLGRDLLTKLKAQIQFSTEGPQVTWEDRPAMCLVLNLEEEYRLHEKPVPPSIDPSWLQLFPMVWAEKAGMGLANQVPPVVVELKSDASPVAVRQYPMSKEAREGIRPHIQRFLDLGILVPCQSPWNTPLLPVKKPGTNDYRPVQDLREVNKRVQDIHPTVPNPYNLLSSLPPSHTWYSVLDLKDAFFCLKLHPNSQPLFAFEWRDPEKGNTGQLTWTRLPQGFKNSPTLFNEALHRDLASFRALNPQVVMLQYVDDLLVAAPTYRDCKEGTRRLLQELSKLGYRVSAKKAQLCREEVTYLGYLLKGGKRWLTPARKATVMKIPTPTTPRQVREFLGTAGFCRLWIPGFASLAAPLYPLTRPKVPFTWTEAHQEAFGRIKEALLSAPALALPDLTKPFALYVDEKEGVARGVLTQTLGPWRRPVAYLSKKLDPVASGWPTCLKAIAAVALLLKDADKLTLGQNVLVIAPHNLESIVRQPPDRWMTNARMTHYQSLLLNERVSFAPPAILNPATLLPVESDDTPIHICSEILAEETGTRPDLRDQPLPGVPAWYTDGSSFIMDGRRQAGAAIVDNKRTVWASNLPEGTSAQKAELIALTQALRLAEGKSINIYTDSRYAFATAHVHGAIYKQRGWLTSAGKDIKNKEEILALLEAIHLPKRVAIIHCPGHQRGTDPVATGNRKADEAAKQAAQSTRILTETTKNAGKRTADGSEFEKRTADGSEFESPKKKAKVE

SEQ ID NO: 7206 - protein, 2096 aa, synthetic construct
MPAAKRVKLDGGDKKYSIGLDIGTNSVGWAVITDEYKVPSKKFKVLGNTDRHSIKKNLIGALLFDSGETAEATRLKRTARRRYTRRKNRICYLQEIFSNEMAKVDDSFFHRLEESFLVEEDKKHERHPIFGNIVDEVAYHEKYPTIYHLRKKLVDSTDKADLRLIYLALAHMIKFRGHFLIEGDLNPDNSDVDKLFIQLVQTYNQLFEENPINASGVDAKAILSARLSKSRRLENLIAQLPGEKKNGLFGNLIALSLGLTPNFKSNFDLAEDAKLQLSKDTYDDDLDNLLAQIGDQYADLFLAAKNLSDAILLSDILRVNTEITKAPLSASMIKRYDEHHQDLTLLKALVRQQLPEKYKEIFFDQSKNGYAGYIDGGASQEEFYKFIKPILEKMDGTEELLVKLNREDLLRKQRTFDNGSIPHQIHLGELHAILRRQEDFYPFLKDNREKIEKILTFRIPYYVGPLARGNSRFAWMTRKSEETITPWNFEEVVDKGASAQSFIERMTNFDKNLPNEKVLPKHSLLYEYFTVYNELTKVKYVTEGMRKPAFLSGEQKKAIVDLLFKTNRKVTVKQLKEDYFKKIECFDSVEISGVEDRFNASLGTYHDLLKIIKDKDFLDNEENEDILEDIVLTLTLFEDREMIEERLKTYAHLFDDKVMKQLKRRRYTGWGRLSRKLINGIRDKQSGKTILDFLKSDGFANRNFMQLIHDDSLTFKEDIQKAQVSGQGDSLHEHIANLAGSPAIKKGILQTVKVVDELVKVMGRHKPENIVIEMARENQTTQKGQKNSRERMKRIEEGIKELGSQILKEHPVENTQLQNEKLYLYYLQNGRDMYVDQELDINRLSDYDVDHIVPQSFLKDDSIDNKVLTRSDKARGKSDNVPSEEVVKKMKNYWRQLLNAKLITQRKFDNLTKAERGGLSELDKAGFIKRQLVETRQITKHVAQILDSRMNTKYDENDKLIREVKVITLKSKLVSDFRKDFQFYKVREINNYHHAHDAYLNAVVGTALIKKYPKLESEFVYGDYKVYDVRKMIAKSEQEIGKATAKYFFYSNIMNFFKTEITLANGEIRKRPLIETNGETGEIVWDKGRDFATVRKVLSMPQVNIVKKTEVQTGGFSKESILPKRNSDKLIARKKDWDPKKYGGFDSPTVAYSVLVVAKVEKGKSKKLKSVKELLGITIMERSSFEKNPIDFLEAKGYKEVKKDLIIKLPKYSLFELENGRKRMLASAGELQKGNELALPSKYVNFLYLASHYEKLKGSPEDNEQKQLFVEQHKHYLDEIIEQISEFSKRVILADANLDKVLSAYNKHRDKPIREQAENIIHLFTLTNLGAPAAFKYFDTTIDRKRYTSTKEVLDATLIHQSITGLYETRIDLSQLGGDGGGGSPAPEAAAKGGTLNIEDEHRLHETSKEPDVSLGSTWLSDFPQAWAETGGMGLAVRQAPLIIPLKATSTPVSIKQYPMSQEARLGIKPHIQRLLDQGILVPCQSPWNTPLLPVKKPGTNDYRPVQDLREVNKRVEDIHPTVPNPYNLLSGLPPSHQWYTVLDLKDAFFCLRLHPTSQPLFAFEWRDPEMGISGQLTWTRLPQGFKNSPTLFDEALHRDLADFRIQHPDLILLQYVDDLLLAATSELDCQQGTRALLQTLGNLGYRASAKKAQICQKQVKYLGYLLKEGQRWLTEARKETVMGQPTPKTPRQLREFLGTAGFCRLWIPGFAEMAAPLYPLTKTGTLFNWGPDQQKAYQEIKQALLTAPALGLPDLTKPFELFVDEKQGYAKGVLTQKLGPWRRPVAYLSKKLDPVAAGWPPCLRMVAAIAVLTKDAGKLTMGQPLVILAPHAVEALVKQPPDRWLSNARMTHYQALLLDTDRVQFGPVVALNPATLLPLPEEGLQHNCLDILAEAHGTRPDLTDQPLPDADHTWYTDGSSLLQEGQRKAGAAVTTETEVIWAKALPAGTSAQRAELIALTQALKMAEGKKLNVYTDSRYAFATAHIHGEIYRRRGLLTSEGKEIKNKDEILALLKALFLPKRLSIIHCPGHQKGHSAEARGNRMADQAARKAAITETPDTSTLLAGKRTADGSEFEKRTADGSEFESPKKKAKVE

SEQ ID NO: 7207 - protein, 2090 aa, synthetic construct
MPAAKRVKLDGGDKKYSIGLDIGTNSVGWAVITDEYKVPSKKFKVLGNTDRHSIKKNLIGALLFDSGETAEATRLKRTARRRYTRRKNRICYLQEIFSNEMAKVDDSFFHRLEESFLVEEDKKHERHPIFGNIVDEVAYHEKYPTIYHLRKKLVDSTDKADLRLIYLALAHMIKFRGHFLIEGDLNPDNSDVDKLFIQLVQTYNQLFEENPINASGVDAKAILSARLSKSRRLENLIAQLPGEKKNGLFGNLIALSLGLTPNFKSNFDLAEDAKLQLSKDTYDDDLDNLLAQIGDQYADLFLAAKNLSDAILLSDILRVNTEITKAPLSASMIKRYDEHHQDLTLLKALVRQQLPEKYKEIFFDQSKNGYAGYIDGGASQEEFYKFIKPILEKMDGTEELLVKLNREDLLRKQRTFDNGSIPHQIHLGELHAILRRQEDFYPFLKDNREKIEKILTFRIPYYVGPLARGNSRFAWMTRKSEETITPWNFEEVVDKGASAQSFIERMTNFDKNLPNEKVLPKHSLLYEYFTVYNELTKVKYVTEGMRKPAFLSGEQKKAIVDLLFKTNRKVTVKQLKEDYFKKIECFDSVEISGVEDRFNASLGTYHDLLKIIKDKDFLDNEENEDILEDIVLTLTLFEDREMIEERLKTYAHLFDDKVMKQLKRRRYTGWGRLSRKLINGIRDKQSGKTILDFLKSDGFANRNFMQLIHDDSLTFKEDIQKAQVSGQGDSLHEHIANLAGSPAIKKGILQTVKVVDELVKVMGRHKPENIVIEMARENQTTQKGQKNSRERMKRIEEGIKELGSQILKEHPVENTQLQNEKLYLYYLQNGRDMYVDQELDINRLSDYDVDHIVPQSFLKDDSIDNKVLTRSDKARGKSDNVPSEEVVKKMKNYWRQLLNAKLITQRKFDNLTKAERGGLSELDKAGFIKRQLVETRQITKHVAQILDSRMNTKYDENDKLIREVKVITLKSKLVSDFRKDFQFYKVREINNYHHAHDAYLNAVVGTALIKKYPKLESEFVYGDYKVYDVRKMIAKSEQEIGKATAKYFFYSNIMNFFKTEITLANGEIRKRPLIETNGETGEIVWDKGRDFATVRKVLSMPQVNIVKKTEVQTGGFSKESILPKRNSDKLIARKKDWDPKKYGGFDSPTVAYSVLVVAKVEKGKSKKLKSVKELLGITIMERSSFEKNPIDFLEAKGYKEVKKDLIIKLPKYSLFELENGRKRMLASAGELQKGNELALPSKYVNFLYLASHYEKLKGSPEDNEQKQLFVEQHKHYLDEIIEQISEFSKRVILADANLDKVLSAYNKHRDKPIREQAENIIHLFTLTNLGAPAAFKYFDTTIDRKRYTSTKEVLDATLIHQSITGLYETRIDLSQLGGDGGGGSPAPEAAAKGGTLQLDDEYRLYSPLVKPDQNIQFWLEQFPQAWAETAGMGLAKQVPPQVIQLKASATPVSVRQYPLSKEAQEGIRPHVQRLIQQGILVPVQSPWNTPLLPVRKPGTNDYRPVQDLREVNKRVQDIHPTVPNPYNLLCALPPQRSWYTVLDLKDAFFCLRLHPTSQPLFAFEWRDPGTGRTGQLTWTRLPQGFKNSPTIFDEALHRDLANFRIQHPQVTLLQYVDDLLLAGATKQDCLEGTKALLLELSDLGYRASAKKAQICRREVTYLGYSLRDGQRWLTEARKKTVVQIPAPTTAKQVREFLGTAGFCRLWIPGFATLAAPLYPLTKEKGEFSWAPEHQKAFDAIKKALLSAPALALPDVTKPFTLYVDERKGVARGVLTQTLGPWRRPVAYLSKKLDPVASGWPVCLKAIAAVAILVKDADKLTLGQNITVIAPHALENIVRQPPDRWMTNARMTHYQSLLLTERVTFAPPAALNPATLLPEETDEPVTHDCHQLLIEETGVRKDLTDIPLTGEVLTWFTDGSSYVVEGKRMAGAAVVDGTRTIWASSLPEGTSAQKAELMALTQALRLAEGKSINIYTDSRYAFATAHVHGAIYKQRGLLTSAGREIKNKEEILSLLEALHLPKRLAIIHCPGHQKAKDPISRGNQMADRVAKQAAQGVNLLAGKRTADGSEFEKRTADGSEFESPKKKAKVE

SEQ ID NO: 7208 - protein, 2087 aa, synthetic construct
MPAAKRVKLDGGDKKYSIGLDIGTNSVGWAVITDEYKVPSKKFKVLGNTDRHSIKKNLIGALLFDSGETAEATRLKRTARRRYTRRKNRICYLQEIFSNEMAKVDDSFFHRLEESFLVEEDKKHERHPIFGNIVDEVAYHEKYPTIYHLRKKLVDSTDKADLRLIYLALAHMIKFRGHFLIEGDLNPDNSDVDKLFIQLVQTYNQLFEENPINASGVDAKAILSARLSKSRRLENLIAQLPGEKKNGLFGNLIALSLGLTPNFKSNFDLAEDAKLQLSKDTYDDDLDNLLAQIGDQYADLFLAAKNLSDAILLSDILRVNTEITKAPLSASMIKRYDEHHQDLTLLKALVRQQLPEKYKEIFFDQSKNGYAGYIDGGASQEEFYKFIKPILEKMDGTEELLVKLNREDLLRKQRTFDNGSIPHQIHLGELHAILRRQEDFYPFLKDNREKIEKILTFRIPYYVGPLARGNSRFAWMTRKSEETITPWNFEEVVDKGASAQSFIERMTNFDKNLPNEKVLPKHSLLYEYFTVYNELTKVKYVTEGMRKPAFLSGEQKKAIVDLLFKTNRKVTVKQLKEDYFKKIECFDSVEISGVEDRFNASLGTYHDLLKIIKDKDFLDNEENEDILEDIVLTLTLFEDREMIEERLKTYAHLFDDKVMKQLKRRRYTGWGRLSRKLINGIRDKQSGKTILDFLKSDGFANRNFMQLIHDDSLTFKEDIQKAQVSGQGDSLHEHIANLAGSPAIKKGILQTVKVVDELVKVMGRHKPENIVIEMARENQTTQKGQKNSRERMKRIEEGIKELGSQILKEHPVENTQLQNEKLYLYYLQNGRDMYVDQELDINRLSDYDVDHIVPQSFLKDDSIDNKVLTRSDKARGKSDNVPSEEVVKKMKNYWRQLLNAKLITQRKFDNLTKAERGGLSELDKAGFIKRQLVETRQITKHVAQILDSRMNTKYDENDKLIREVKVITLKSKLVSDFRKDFQFYKVREINNYHHAHDAYLNAVVGTALIKKYPKLESEFVYGDYKVYDVRKMIAKSEQEIGKATAKYFFYSNIMNFFKTEITLANGEIRKRPLIETNGETGEIVWDKGRDFATVRKVLSMPQVNIVKKTEVQTGGFSKESILPKRNSDKLIARKKDWDPKKYGGFDSPTVAYSVLVVAKVEKGKSKKLKSVKELLGITIMERSSFEKNPIDFLEAKGYKEVKKDLIIKLPKYSLFELENGRKRMLASAGELQKGNELALPSKYVNFLYLASHYEKLKGSPEDNEQKQLFVEQHKHYLDEIIEQISEFSKRVILADANLDKVLSAYNKHRDKPIREQAENIIHLFTLTNLGAPAAFKYFDTTIDRKRYTSTKEVLDATLIHQSITGLYETRIDLSQLGGDGGGGSPAPEAAAKGGIPWLMKKPLQLTTLVPLQEYEERLLKQTMLTGSYKEKLQSLFLKYDALWQHWENQVGHRRIKPHHIATGTVNPRPQKQYPINPKAKASIQTVINDLLKQGVLIQQNSIMNTPVYPVPKPDGKWRMVLDYREVNKTIPLIAAQNQHSAGILSSIFRGKYKTTLDLSNGFWAHSITPESYWLTAFTWLGQQYCWTRLPQGFLNSPALFNADVVDLLKEVPNVQVYVDDIYISHDDPREHLEQLEKVFSLLLNAGYVVSLKKSEIAQHEVEFLGFNITKEGRGLTETFKQKLLNITPPRDLKQLQSILGLLNFARNFIPNFSELVKPLYNIIATAPGKYITWTTDNSQQLQNIISMLNSAENLEERNPEVRLIMKVNTSPSAGYIRFYNEFAKRPIMYLNYVYTKAEVKFTNTEKLLTTIHKGLIKALDLGMGQEILVYSPIVSMTKIQKTPLPERKALPIRWITWMSYLEDPRIQFHYDKTLPELQQVPTVTDDIIAKIKHPSEFSMVFYTDGSAIKHPNVNKSHNAGMGIAQVQFKPEFTVINTWSIPLGDHTAQLAEVAAVEFACKKALKIDGPVLIVTDSFYVAESVNKELPYWQSNGFFNNKKKPLKHVSKWKSIADCIQLKPDIIIIHEKGHQPTASTFHTEGNNLADKLATQGSYVVNAGKRTADGSEFEKRTADGSEFESPKKKAKVE

SEQ ID NO: 7209 - protein, 2094 aa, synthetic construct
MPAAKRVKLDGGDKKYSIGLDIGTNSVGWAVITDEYKVPSKKFKVLGNTDRHSIKKNLIGALLFDSGETAEATRLKRTARRRYTRRKNRICYLQEIFSNEMAKVDDSFFHRLEESFLVEEDKKHERHPIFGNIVDEVAYHEKYPTIYHLRKKLVDSTDKADLRLIYLALAHMIKFRGHFLIEGDLNPDNSDVDKLFIQLVQTYNQLFEENPINASGVDAKAILSARLSKSRRLENLIAQLPGEKKNGLFGNLIALSLGLTPNFKSNFDLAEDAKLQLSKDTYDDDLDNLLAQIGDQYADLFLAAKNLSDAILLSDILRVNTEITKAPLSASMIKRYDEHHQDLTLLKALVRQQLPEKYKEIFFDQSKNGYAGYIDGGASQEEFYKFIKPILEKMDGTEELLVKLNREDLLRKQRTFDNGSIPHQIHLGELHAILRRQEDFYPFLKDNREKIEKILTFRIPYYVGPLARGNSRFAWMTRKSEETITPWNFEEVVDKGASAQSFIERMTNFDKNLPNEKVLPKHSLLYEYFTVYNELTKVKYVTEGMRKPAFLSGEQKKAIVDLLFKTNRKVTVKQLKEDYFKKIECFDSVEISGVEDRFNASLGTYHDLLKIIKDKDFLDNEENEDILEDIVLTLTLFEDREMIEERLKTYAHLFDDKVMKQLKRRRYTGWGRLSRKLINGIRDKQSGKTILDFLKSDGFANRNFMQLIHDDSLTFKEDIQKAQVSGQGDSLHEHIANLAGSPAIKKGILQTVKVVDELVKVMGRHKPENIVIEMARENQTTQKGQKNSRERMKRIEEGIKELGSQILKEHPVENTQLQNEKLYLYYLQNGRDMYVDQELDINRLSDYDVDHIVPQSFLKDDSIDNKVLTRSDKARGKSDNVPSEEVVKKMKNYWRQLLNAKLITQRKFDNLTKAERGGLSELDKAGFIKRQLVETRQITKHVAQILDSRMNTKYDENDKLIREVKVITLKSKLVSDFRKDFQFYKVREINNYHHAHDAYLNAVVGTALIKKYPKLESEFVYGDYKVYDVRKMIAKSEQEIGKATAKYFFYSNIMNFFKTEITLANGEIRKRPLIETNGETGEIVWDKGRDFATVRKVLSMPQVNIVKKTEVQTGGFSKESILPKRNSDKLIARKKDWDPKKYGGFDSPTVAYSVLVVAKVEKGKSKKLKSVKELLGITIMERSSFEKNPIDFLEAKGYKEVKKDLIIKLPKYSLFELENGRKRMLASAGELQKGNELALPSKYVNFLYLASHYEKLKGSPEDNEQKQLFVEQHKHYLDEIIEQISEFSKRVILADANLDKVLSAYNKHRDKPIREQAENIIHLFTLTNLGAPAAFKYFDTTIDRKRYTSTKEVLDATLIHQSITGLYETRIDLSQLGGDGGGGSPAPEAAAKGGVLNLEEEYRLHEKPVPSSIDPSWLQLFPTVWAERAGMGLANQVPPVVVELRSGASPVAVRQYPMSKEAREGIRPHIQRFLDLGVLVPCQSPWNTPLLPVKKPGTNDYRPVQDLREINKRVQDIHPTVPNPYNLLSSLPPSHTWYSVLDLKDAFFCLKLHPNSQPLFAFEWRDPEKGNTGQLTWTRLPQGFKNSPTLFNEALHRDLAPFRALNPQVVLLQYVDDLLVAAPTYRDCKEGTQKLLQELSKLGYRVSAKKAQLCQKEVTYLGYLLKEGKRWLTPARKATVMKIPPPTTPRQVREFLGTAGFCRLWIPGFASLAAPLYPLTKPSIPFIWTEEHQKAFDRIKEALLSAPALALPDLTKPFTLYVDERAGVARGVLTQTLGPWRRPVAYLSKKLDPVASGWPTCLKAVAAVALLLKDADKLTLGQNVTVIASHSLESIVRQPPDRWMTNARMTHYQSLLLNERVSFAPPAVLNPATLLPVESEATPVHRCSEILAEETGTRRDLKDQPLPGVPAWYTDGSSFIAEGKRRAGAAIVDGKRTVWASSLPEGTSAQKAELVALTQALRLAEGKDINIYTDSRYAFATAHIHGAIYKQRGWLTSAGKDIKNKEEILALLEAIHLPKRVAIIHCPGHQKGNDPVATGNRRADEAAKQAALSTRVLAETTKPAGKRTADGSEFEKRTADGSEFESPKKKAKVE

SEQ ID NO: 7210 - protein, 2102 aa, synthetic construct
MPAAKRVKLDGGDKKYSIGLDIGTNSVGWAVITDEYKVPSKKFKVLGNTDRHSIKKNLIGALLFDSGETAEATRLKRTARRRYTRRKNRICYLQEIFSNEMAKVDDSFFHRLEESFLVEEDKKHERHPIFGNIVDEVAYHEKYPTIYHLRKKLVDSTDKADLRLIYLALAHMIKFRGHFLIEGDLNPDNSDVDKLFIQLVQTYNQLFEENPINASGVDAKAILSARLSKSRRLENLIAQLPGEKKNGLFGNLIALSLGLTPNFKSNFDLAEDAKLQLSKDTYDDDLDNLLAQIGDQYADLFLAAKNLSDAILLSDILRVNTEITKAPLSASMIKRYDEHHQDLTLLKALVRQQLPEKYKEIFFDQSKNGYAGYIDGGASQEEFYKFIKPILEKMDGTEELLVKLNREDLLRKQRTFDNGSIPHQIHLGELHAILRRQEDFYPFLKDNREKIEKILTFRIPYYVGPLARGNSRFAWMTRKSEETITPWNFEEVVDKGASAQSFIERMTNFDKNLPNEKVLPKHSLLYEYFTVYNELTKVKYVTEGMRKPAFLSGEQKKAIVDLLFKTNRKVTVKQLKEDYFKKIECFDSVEISGVEDRFNASLGTYHDLLKIIKDKDFLDNEENEDILEDIVLTLTLFEDREMIEERLKTYAHLFDDKVMKQLKRRRYTGWGRLSRKLINGIRDKQSGKTILDFLKSDGFANRNFMQLIHDDSLTFKEDIQKAQVSGQGDSLHEHIANLAGSPAIKKGILQTVKVVDELVKVMGRHKPENIVIEMARENQTTQKGQKNSRERMKRIEEGIKELGSQILKEHPVENTQLQNEKLYLYYLQNGRDMYVDQELDINRLSDYDVDHIVPQSFLKDDSIDNKVLTRSDKARGKSDNVPSEEVVKKMKNYWRQLLNAKLITQRKFDNLTKAERGGLSELDKAGFIKRQLVETRQITKHVAQILDSRMNTKYDENDKLIREVKVITLKSKLVSDFRKDFQFYKVREINNYHHAHDAYLNAVVGTALIKKYPKLESEFVYGDYKVYDVRKMIAKSEQEIGKATAKYFFYSNIMNFFKTEITLANGEIRKRPLIETNGETGEIVWDKGRDFATVRKVLSMPQVNIVKKTEVQTGGFSKESILPKRNSDKLIARKKDWDPKKYGGFDSPTVAYSVLVVAKVEKGKSKKLKSVKELLGITIMERSSFEKNPIDFLEAKGYKEVKKDLIIKLPKYSLFELENGRKRMLASAGELQKGNELALPSKYVNFLYLASHYEKLKGSPEDNEQKQLFVEQHKHYLDEIIEQISEFSKRVILADANLDKVLSAYNKHRDKPIREQAENIIHLFTLTNLGAPAAFKYFDTTIDRKRYTSTKEVLDATLIHQSITGLYETRIDLSQLGGDGGEAAAKGGSPAPGGTVSLQDEHRLFDIPVTTSLPDVWLQDFPQAWAETGGLGRAKCQAPIIIDLKPTAVPVSIKQYPMSLEAHMGIRQHIIKFLELGVLRPCRSPWNTPLLPVKKPGTQDYRPVQDLREINKRTVDIHPTVPNPYNLLSTLKPDYSWYTVLDLKDAFFCLPLAPQSQELFAFEWKDPERGISGQLTWTRLPQGFKNSPTLFNEALHRDLTDFRTQHPEVTLLQYVDDLLLAAPTKKACTQGTRHLLQELGEKGYRASAKKAQICQTKVTYLGYILSEGKRWLTPGRIETVARIPPPRNPREVREFLGTAGFCRLWIPGFAELAAPLYALTKPSTPFTWQTEHQLAFEALKKALLSAPALGLPDTSKPFTLFLDERQGIAKGVLTQKLGPWKRPVAYLSKKLDPVAAGWPPCLRIMAATAMLVKDSAKLTLGQPLTVITPHTLEAIVRQPPDRWITNARLTHYQALLLDTDRVQFGPPVTLNPATLLPVPENQPSPHDCRQVLAETHGTREDLKDQELPDADHTWYTDGSSYLDSGTRRAGAAVVDGHNTIWAQSLPPGTSAQKAELIALTKALELSKGKKANIYTDSRYAFATAHTHGSIYERRGWLTSEGKEIKNKAEIIALLKALFLPQEVAIIHCPGHQKGQDPVAVGNRQADRVARQAAMAEVLTLATEPDNTSHITAGKRTADGSEFEKRTADGSEFESPKKKAKVE

SEQ ID NO: 7211 - protein, 2087 aa, synthetic construct
MPAAKRVKLDGGDKKYSIGLDIGTNSVGWAVITDEYKVPSKKFKVLGNTDRHSIKKNLIGALLFDSGETAEATRLKRTARRRYTRRKNRICYLQEIFSNEMAKVDDSFFHRLEESFLVEEDKKHERHPIFGNIVDEVAYHEKYPTIYHLRKKLVDSTDKADLRLIYLALAHMIKFRGHFLIEGDLNPDNSDVDKLFIQLVQTYNQLFEENPINASGVDAKAILSARLSKSRRLENLIAQLPGEKKNGLFGNLIALSLGLTPNFKSNFDLAEDAKLQLSKDTYDDDLDNLLAQIGDQYADLFLAAKNLSDAILLSDILRVNTEITKAPLSASMIKRYDEHHQDLTLLKALVRQQLPEKYKEIFFDQSKNGYAGYIDGGASQEEFYKFIKPILEKMDGTEELLVKLNREDLLRKQRTFDNGSIPHQIHLGELHAILRRQEDFYPFLKDNREKIEKILTFRIPYYVGPLARGNSRFAWMTRKSEETITPWNFEEVVDKGASAQSFIERMTNFDKNLPNEKVLPKHSLLYEYFTVYNELTKVKYVTEGMRKPAFLSGEQKKAIVDLLFKTNRKVTVKQLKEDYFKKIECFDSVEISGVEDRFNASLGTYHDLLKIIKDKDFLDNEENEDILEDIVLTLTLFEDREMIEERLKTYAHLFDDKVMKQLKRRRYTGWGRLSRKLINGIRDKQSGKTILDFLKSDGFANRNFMQLIHDDSLTFKEDIQKAQVSGQGDSLHEHIANLAGSPAIKKGILQTVKVVDELVKVMGRHKPENIVIEMARENQTTQKGQKNSRERMKRIEEGIKELGSQILKEHPVENTQLQNEKLYLYYLQNGRDMYVDQELDINRLSDYDVDHIVPQSFLKDDSIDNKVLTRSDKARGKSDNVPSEEVVKKMKNYWRQLLNAKLITQRKFDNLTKAERGGLSELDKAGFIKRQLVETRQITKHVAQILDSRMNTKYDENDKLIREVKVITLKSKLVSDFRKDFQFYKVREINNYHHAHDAYLNAVVGTALIKKYPKLESEFVYGDYKVYDVRKMIAKSEQEIGKATAKYFFYSNIMNFFKTEITLANGEIRKRPLIETNGETGEIVWDKGRDFATVRKVLSMPQVNIVKKTEVQTGGFSKESILPKRNSDKLIARKKDWDPKKYGGFDSPTVAYSVLVVAKVEKGKSKKLKSVKELLGITIMERSSFEKNPIDFLEAKGYKEVKKDLIIKLPKYSLFELENGRKRMLASAGELQKGNELALPSKYVNFLYLASHYEKLKGSPEDNEQKQLFVEQHKHYLDEIIEQISEFSKRVILADANLDKVLSAYNKHRDKPIREQAENIIHLFTLTNLGAPAAFKYFDTTIDRKRYTSTKEVLDATLIHQSITGLYETRIDLSQLGGDGGEAAAKGGSPAPGGVPWILKKPLELTIKLDLEEQQGTLLNNSILSKKGKEELKQLFEKYSALWQSWENQVGHRRIRPHKIATGTVKPTPQKQYHINPKAKPDIQIVINDLLKQGVLIQKESTMNTPVYPVPKPNGRWRMVLDYRAVNKVTPLIAVQNQHSYGILGSLFKGRYKTTIDLSNGFWAHPIVPEDYWITAFTWQGKQYCWTVLPQGFLNSPGLFNGDVVDLLQGIPNVEVYVDDVYISHDSEKEHLEYLDILFNRLKEAGYIISLKKSNIANSIVDFLGFQITNEGRGLTDTFKEKLENITAPTTLKQLQSILGLLNFARNFIPDFTELIAPLYALIPKSPKNYVPWQIEHSTTLETLITKLNGAEYLQGRKGDKTLIMKVNASYTTGYIRYYNEGEKKPISYVSIVFSKTELKFTELEKLLTTVHKGLLKALDLSMGQNIHVYSPIVSMQNIQKTPQTAKKALASRWLSWLSYLEDPRIRFFYDPQMPALKDLPAVDTGKDNKKHPSNFQHIFYTDGSAITSPTKEGHLNAGMGIVYFINKDGNLQKQQEWSISLGNHTAQFAEIAAFEFALKKCLPLGGNILVVTDSNYVAKAYNEELDVWASNGFVNNRKKPLKHISKWKSVADLKRLRPDVVVTHEPGHQKLDSSPHAYGNNLADQLATQASFKVHAGKRTADGSEFEKRTADGSEFESPKKKAKVE

SEQ ID NO: 7212 - protein, 2095 aa, synthetic construct
MPAAKRVKLDGGDKKYSIGLDIGTNSVGWAVITDEYKVPSKKFKVLGNTDRHSIKKNLIGALLFDSGETAEATRLKRTARRRYTRRKNRICYLQEIFSNEMAKVDDSFFHRLEESFLVEEDKKHERHPIFGNIVDEVAYHEKYPTIYHLRKKLVDSTDKADLRLIYLALAHMIKFRGHFLIEGDLNPDNSDVDKLFIQLVQTYNQLFEENPINASGVDAKAILSARLSKSRRLENLIAQLPGEKKNGLFGNLIALSLGLTPNFKSNFDLAEDAKLQLSKDTYDDDLDNLLAQIGDQYADLFLAAKNLSDAILLSDILRVNTEITKAPLSASMIKRYDEHHQDLTLLKALVRQQLPEKYKEIFFDQSKNGYAGYIDGGASQEEFYKFIKPILEKMDGTEELLVKLNREDLLRKQRTFDNGSIPHQIHLGELHAILRRQEDFYPFLKDNREKIEKILTFRIPYYVGPLARGNSRFAWMTRKSEETITPWNFEEVVDKGASAQSFIERMTNFDKNLPNEKVLPKHSLLYEYFTVYNELTKVKYVTEGMRKPAFLSGEQKKAIVDLLFKTNRKVTVKQLKEDYFKKIECFDSVEISGVEDRFNASLGTYHDLLKIIKDKDFLDNEENEDILEDIVLTLTLFEDREMIEERLKTYAHLFDDKVMKQLKRRRYTGWGRLSRKLINGIRDKQSGKTILDFLKSDGFANRNFMQLIHDDSLTFKEDIQKAQVSGQGDSLHEHIANLAGSPAIKKGILQTVKVVDELVKVMGRHKPENIVIEMARENQTTQKGQKNSRERMKRIEEGIKELGSQILKEHPVENTQLQNEKLYLYYLQNGRDMYVDQELDINRLSDYDVDHIVPQSFLKDDSIDNKVLTRSDKARGKSDNVPSEEVVKKMKNYWRQLLNAKLITQRKFDNLTKAERGGLSELDKAGFIKRQLVETRQITKHVAQILDSRMNTKYDENDKLIREVKVITLKSKLVSDFRKDFQFYKVREINNYHHAHDAYLNAVVGTALIKKYPKLESEFVYGDYKVYDVRKMIAKSEQEIGKATAKYFFYSNIMNFFKTEITLANGEIRKRPLIETNGETGEIVWDKGRDFATVRKVLSMPQVNIVKKTEVQTGGFSKESILPKRNSDKLIARKKDWDPKKYGGFDSPTVAYSVLVVAKVEKGKSKKLKSVKELLGITIMERSSFEKNPIDFLEAKGYKEVKKDLIIKLPKYSLFELENGRKRMLASAGELQKGNELALPSKYVNFLYLASHYEKLKGSPEDNEQKQLFVEQHKHYLDEIIEQISEFSKRVILADANLDKVLSAYNKHRDKPIREQAENIIHLFTLTNLGAPAAFKYFDTTIDRKRYTSTKEVLDATLIHQSITGLYETRIDLSQLGGDGGEAAAKGGSPAPGGTLQLEEEYRLFEPESTQKQEMDIWLKNFPQAWAETGGMGTAHCQAPVLIQLKATATPISIRQYPMPHEAYQGIKPHIRRMLDQGILKPCQSPWNTPLLPVKKPGTEDYRPVQDLREVNKRVEDIHPTVPNPYNLLSTLPPSHPWYTVLDLKDAFFCLRLHSESQLLFAFEWRDPEIGLSGQLTWTRLPQGFKNSPTLFNEALHSDLADFRVRYPALVLLQYVDDLLLAAATRTECLEGTKALLETLGNKGYRASAKKAQICLQEVTYLGYSLKDGQRWLTKARKEAILSIPVPKNSRQVREFLGKAGYCRLFIPGFAELAAPLYPLTRPGTLFQWGTEQQLAFEDIKKALLSSPALGLPDITKPFELFIDENSGFAKGVLVQKLGPWKRPVAYLSKKLDTVASGWPPCLRMVAAIAILVKDAGKLTLGQPLTILTSHPVEALVRQPPNKWLSNARMTHYQAMLLDAERVHFGPTVSLNPATLLPLPSGGNHHDCLQILAETHGTRPDLTDQPLPDADLTWYTDGSSFIRNGEREAGAAVTTESEVIWAAPLPPGTSAQRAELIALTQALKMAEGKKLTVYTDSRYAFATTHVHGEIYRRRGWLTSEGKEIKNKNEILALLEALFLPKRLSIIHCPGHQKGDSPQAKGNRLADDTAKKAATETHSSLTVLPAGKRTADGSEFEKRTADGSEFESPKKKAKVE

SEQ ID NO: 7213 - protein, 2176 aa, synthetic construct
MPAAKRVKLDGGDKKYSIGLDIGTNSVGWAVITDEYKVPSKKFKVLGNTDRHSIKKNLIGALLFDSGETAEATRLKRTARRRYTRRKNRICYLQEIFSNEMAKVDDSFFHRLEESFLVEEDKKHERHPIFGNIVDEVAYHEKYPTIYHLRKKLVDSTDKADLRLIYLALAHMIKFRGHFLIEGDLNPDNSDVDKLFIQLVQTYNQLFEENPINASGVDAKAILSARLSKSRRLENLIAQLPGEKKNGLFGNLIALSLGLTPNFKSNFDLAEDAKLQLSKDTYDDDLDNLLAQIGDQYADLFLAAKNLSDAILLSDILRVNTEITKAPLSASMIKRYDEHHQDLTLLKALVRQQLPEKYKEIFFDQSKNGYAGYIDGGASQEEFYKFIKPILEKMDGTEELLVKLNREDLLRKQRTFDNGSIPHQIHLGELHAILRRQEDFYPFLKDNREKIEKILTFRIPYYVGPLARGNSRFAWMTRKSEETITPWNFEEVVDKGASAQSFIERMTNFDKNLPNEKVLPKHSLLYEYFTVYNELTKVKYVTEGMRKPAFLSGEQKKAIVDLLFKTNRKVTVKQLKEDYFKKIECFDSVEISGVEDRFNASLGTYHDLLKIIKDKDFLDNEENEDILEDIVLTLTLFEDREMIEERLKTYAHLFDDKVMKQLKRRRYTGWGRLSRKLINGIRDKQSGKTILDFLKSDGFANRNFMQLIHDDSLTFKEDIQKAQVSGQGDSLHEHIANLAGSPAIKKGILQTVKVVDELVKVMGRHKPENIVIEMARENQTTQKGQKNSRERMKRIEEGIKELGSQILKEHPVENTQLQNEKLYLYYLQNGRDMYVDQELDINRLSDYDVDHIVPQSFLKDDSIDNKVLTRSDKARGKSDNVPSEEVVKKMKNYWRQLLNAKLITQRKFDNLTKAERGGLSELDKAGFIKRQLVETRQITKHVAQILDSRMNTKYDENDKLIREVKVITLKSKLVSDFRKDFQFYKVREINNYHHAHDAYLNAVVGTALIKKYPKLESEFVYGDYKVYDVRKMIAKSEQEIGKATAKYFFYSNIMNFFKTEITLANGEIRKRPLIETNGETGEIVWDKGRDFATVRKVLSMPQVNIVKKTEVQTGGFSKESILPKRNSDKLIARKKDWDPKKYGGFDSPTVAYSVLVVAKVEKGKSKKLKSVKELLGITIMERSSFEKNPIDFLEAKGYKEVKKDLIIKLPKYSLFELENGRKRMLASAGELQKGNELALPSKYVNFLYLASHYEKLKGSPEDNEQKQLFVEQHKHYLDEIIEQISEFSKRVILADANLDKVLSAYNKHRDKPIREQAENIIHLFTLTNLGAPAAFKYFDTTIDRKRYTSTKEVLDATLIHQSITGLYETRIDLSQLGGDGGEAAAKGGSPAPGGMNPLQLLQPLPAEIKGTKLLAHWNSGATITCIPESFLEDEQPIKKTLIKTIHGEKQQNVYYVTFKVKGRKVEAEVIASPYEYILLSPTDVPWLTQQPLQLTILVPLQEYQEKILSKTALPEDQKQQLKTLFVKYDNLWQHWENQVGHRKIRPHNIATGDYPPRPQKQYPINPKAKPSIQIVIDDLLKQGVLTPQNSTMNTPVYPVPKPDGRWRMVLDYREVNKTIPLTAAQNQHSAGILATIVRQKYKTTLDLANGFWAHPITPESYWLTAFTWQGKQYCWTRLPQGFLNSPALFNADVVDLLKEIPNVQVYVDDIYLSHDDPKEHVQQLEKVFQILLQAGYVVSLKKSEIGQKTVEFLGFNITKEGRGLTDTFKTKLLNITPPKDLKQLQSILGKLNFARNFIPNFAELVQPLYNLIAPAKGKYIEWSEENTKQLNMVIEALNTASNLEERLPEQRLVIKVNTSPSAGYVRYYNETGKKPIMYLNYVFSKAELKFSMLEKLLTTMHKALIKAMDLAMGQEILVYSPIVSMTKIQKTPLPERKALPIRWITWMTYLEDPRIQFHYDKTLPELKHIPDVYTSSQSPVKHPSQYEGVFYTDGSAIKSPDPTKSNNAGMGIVHATYKPEYQVLNQWSIPLGNHTAQMAEIAAVEFACKKALKIPGPVLVITDSFYVAESANKELPYWKSNGFVNNKKKPLKHISKWKSIAECLSMKPDITIQHEKGISLQIPVFILKGNALADKLATQGSYVVNAGKRTADGSEFEKRTADGSEFESPKKKAKVE

SEQ ID NO: 7214 - protein, 2094 aa, synthetic construct
MPAAKRVKLDGGDKKYSIGLDIGTNSVGWAVITDEYKVPSKKFKVLGNTDRHSIKKNLIGALLFDSGETAEATRLKRTARRRYTRRKNRICYLQEIFSNEMAKVDDSFFHRLEESFLVEEDKKHERHPIFGNIVDEVAYHEKYPTIYHLRKKLVDSTDKADLRLIYLALAHMIKFRGHFLIEGDLNPDNSDVDKLFIQLVQTYNQLFEENPINASGVDAKAILSARLSKSRRLENLIAQLPGEKKNGLFGNLIALSLGLTPNFKSNFDLAEDAKLQLSKDTYDDDLDNLLAQIGDQYADLFLAAKNLSDAILLSDILRVNTEITKAPLSASMIKRYDEHHQDLTLLKALVRQQLPEKYKEIFFDQSKNGYAGYIDGGASQEEFYKFIKPILEKMDGTEELLVKLNREDLLRKQRTFDNGSIPHQIHLGELHAILRRQEDFYPFLKDNREKIEKILTFRIPYYVGPLARGNSRFAWMTRKSEETITPWNFEEVVDKGASAQSFIERMTNFDKNLPNEKVLPKHSLLYEYFTVYNELTKVKYVTEGMRKPAFLSGEQKKAIVDLLFKTNRKVTVKQLKEDYFKKIECFDSVEISGVEDRFNASLGTYHDLLKIIKDKDFLDNEENEDILEDIVLTLTLFEDREMIEERLKTYAHLFDDKVMKQLKRRRYTGWGRLSRKLINGIRDKQSGKTILDFLKSDGFANRNFMQLIHDDSLTFKEDIQKAQVSGQGDSLHEHIANLAGSPAIKKGILQTVKVVDELVKVMGRHKPENIVIEMARENQTTQKGQKNSRERMKRIEEGIKELGSQILKEHPVENTQLQNEKLYLYYLQNGRDMYVDQELDINRLSDYDVDHIVPQSFLKDDSIDNKVLTRSDKARGKSDNVPSEEVVKKMKNYWRQLLNAKLITQRKFDNLTKAERGGLSELDKAGFIKRQLVETRQITKHVAQILDSRMNTKYDENDKLIREVKVITLKSKLVSDFRKDFQFYKVREINNYHHAHDAYLNAVVGTALIKKYPKLESEFVYGDYKVYDVRKMIAKSEQEIGKATAKYFFYSNIMNFFKTEITLANGEIRKRPLIETNGETGEIVWDKGRDFATVRKVLSMPQVNIVKKTEVQTGGFSKESILPKRNSDKLIARKKDWDPKKYGGFDSPTVAYSVLVVAKVEKGKSKKLKSVKELLGITIMERSSFEKNPIDFLEAKGYKEVKKDLIIKLPKYSLFELENGRKRMLASAGELQKGNELALPSKYVNFLYLASHYEKLKGSPEDNEQKQLFVEQHKHYLDEIIEQISEFSKRVILADANLDKVLSAYNKHRDKPIREQAENIIHLFTLTNLGAPAAFKYFDTTIDRKRYTSTKEVLDATLIHQSITGLYETRIDLSQLGGDGGEAAAKGGSPAPGGVLNLEEEYRLHEKPVPSSIDPSWLQLFPTVWAERAGMGLANQVPPVVVELRSGASPVAVRQYPMSKEAREGIRPHIQKFLDLGVLVPCRSPWNTPLLPVKKPGTNDYRPVQDLREINKRVQDIHPTVPNPYNLLSSLPPSYTWYSVLDLKDAFFCLRLHPNSQPLFAFEWKDPEKGNTGQLTWTRLPQGFKNSPTLFNEALHRDLAPFRALNPQVVLLQYVDDLLVAAPTYEDCKKGTQKLLQELSKLGYRVSAKKAQLCQREVTYLGYLLKEGKRWLTPARKATVMKIPVPTTPRQVREFLGTAGFCRLWIPGFASLAAPLYPLTKPSIPFIWTEEHQQAFDHIKKALLSAPALALPDLTKPFTLYIDERAGVARGVLTQTLGPWRRPVAYLSKKLDPVASGWPTCLKAVAAVALLLKDADKLTLGQNVTVIASHSLESIVRQPPDRWMTNARMTHYQSLLLNERVSFAPPAVLNPATLLPVESEATPVHRCSEILAEETGTRRDLEDQPLPGVPTWYTDGSSFITEGKRRAGAPIVDGKRTVWASSLPEGTSAQKAELVALTQALRLAEGKNINIYTDSRYAFATAHIHGAIYKQRGWLTSAGKDIKNKEEILALLEAIHLPRRVAIIHCPGHQRGSNPVATGNRRADEAAKQAALSTRVLAGTTKPAGKRTADGSEFEKRTADGSEFESPKKKAKVE

SEQ ID NO: 7215 - protein, 2127 aa, synthetic construct
MPAAKRVKLDGGDKKYSIGLDIGTNSVGWAVITDEYKVPSKKFKVLGNTDRHSIKKNLIGALLFDSGETAEATRLKRTARRRYTRRKNRICYLQEIFSNEMAKVDDSFFHRLEESFLVEEDKKHERHPIFGNIVDEVAYHEKYPTIYHLRKKLVDSTDKADLRLIYLALAHMIKFRGHFLIEGDLNPDNSDVDKLFIQLVQTYNQLFEENPINASGVDAKAILSARLSKSRRLENLIAQLPGEKKNGLFGNLIALSLGLTPNFKSNFDLAEDAKLQLSKDTYDDDLDNLLAQIGDQYADLFLAAKNLSDAILLSDILRVNTEITKAPLSASMIKRYDEHHQDLTLLKALVRQQLPEKYKEIFFDQSKNGYAGYIDGGASQEEFYKFIKPILEKMDGTEELLVKLNREDLLRKQRTFDNGSIPHQIHLGELHAILRRQEDFYPFLKDNREKIEKILTFRIPYYVGPLARGNSRFAWMTRKSEETITPWNFEEVVDKGASAQSFIERMTNFDKNLPNEKVLPKHSLLYEYFTVYNELTKVKYVTEGMRKPAFLSGEQKKAIVDLLFKTNRKVTVKQLKEDYFKKIECFDSVEISGVEDRFNASLGTYHDLLKIIKDKDFLDNEENEDILEDIVLTLTLFEDREMIEERLKTYAHLFDDKVMKQLKRRRYTGWGRLSRKLINGIRDKQSGKTILDFLKSDGFANRNFMQLIHDDSLTFKEDIQKAQVSGQGDSLHEHIANLAGSPAIKKGILQTVKVVDELVKVMGRHKPENIVIEMARENQTTQKGQKNSRERMKRIEEGIKELGSQILKEHPVENTQLQNEKLYLYYLQNGRDMYVDQELDINRLSDYDVDHIVPQSFLKDDSIDNKVLTRSDKARGKSDNVPSEEVVKKMKNYWRQLLNAKLITQRKFDNLTKAERGGLSELDKAGFIKRQLVETRQITKHVAQILDSRMNTKYDENDKLIREVKVITLKSKLVSDFRKDFQFYKVREINNYHHAHDAYLNAVVGTALIKKYPKLESEFVYGDYKVYDVRKMIAKSEQEIGKATAKYFFYSNIMNFFKTEITLANGEIRKRPLIETNGETGEIVWDKGRDFATVRKVLSMPQVNIVKKTEVQTGGFSKESILPKRNSDKLIARKKDWDPKKYGGFDSPTVAYSVLVVAKVEKGKSKKLKSVKELLGITIMERSSFEKNPIDFLEAKGYKEVKKDLIIKLPKYSLFELENGRKRMLASAGELQKGNELALPSKYVNFLYLASHYEKLKGSPEDNEQKQLFVEQHKHYLDEIIEQISEFSKRVILADANLDKVLSAYNKHRDKPIREQAENIIHLFTLTNLGAPAAFKYFDTTIDRKRYTSTKEVLDATLIHQSITGLYETRIDLSQLGGDGGEAAAKGGSPAPGGLLGRDLLTKLKAQIQFSTEGPQVTWEDRPAMCLVLNLEEEYRLHEKPVPPSIDPSWLQLFPMVWAEKAGMGLANQVPPVVVELKSDASPVAVRQYPMSKEAREGIRPHIQRFLDLGILVPCQSPWNTPLLPVKKPGTNDYRPVQDLREVNKRVQDIHPTVPNPYNLLSSLPPSHTWYSVLDLKDAFFCLKLHPNSQPLFAFEWRDPEKGNTGQLTWTRLPQGFKNSPTLFNEALHRDLASFRALNPQVVMLQYVDDLLVAAPTYRDCKEGTRRLLQELSKLGYRVSAKKAQLCREEVTYLGYLLKGGKRWLTPARKATVMKIPTPTTPRQVREFLGTAGFCRLWIPGFASLAAPLYPLTRPKVPFTWTEAHQEAFGRIKEALLSAPALALPDLTKPFALYVDEKEGVARGVLTQTLGPWRRPVAYLSKKLDPVASGWPTCLKAIAAVALLLKDADKLTLGQNVLVIAPHNLESIVRQPPDRWMTNARMTHYQSLLLNERVSFAPPAILNPATLLPVESDDTPIHICSEILAEETGTRPDLRDQPLPGVPAWYTDGSSFIMDGRRQAGAAIVDNKRTVWASNLPEGTSAQKAELIALTQALRLAEGKSINIYTDSRYAFATAHVHGAIYKQRGWLTSAGKDIKNKEEILALLEAIHLPKRVAIIHCPGHQRGTDPVATGNRKADEAAKQAAQSTRILTETTKNAGKRTADGSEFEKRTADGSEFESPKKKAKVE

SEQ ID NO: 7216 - protein, 2127 aa, synthetic construct
MPAAKRVKLDGGDKKYSIGLDIGTNSVGWAVITDEYKVPSKKFKVLGNTDRHSIKKNLIGALLFDSGETAEATRLKRTARRRYTRRKNRICYLQEIFSNEMAKVDDSFFHRLEESFLVEEDKKHERHPIFGNIVDEVAYHEKYPTIYHLRKKLVDSTDKADLRLIYLALAHMIKFRGHFLIEGDLNPDNSDVDKLFIQLVQTYNQLFEENPINASGVDAKAILSARLSKSRRLENLIAQLPGEKKNGLFGNLIALSLGLTPNFKSNFDLAEDAKLQLSKDTYDDDLDNLLAQIGDQYADLFLAAKNLSDAILLSDILRVNTEITKAPLSASMIKRYDEHHQDLTLLKALVRQQLPEKYKEIFFDQSKNGYAGYIDGGASQEEFYKFIKPILEKMDGTEELLVKLNREDLLRKQRTFDNGSIPHQIHLGELHAILRRQEDFYPFLKDNREKIEKILTFRIPYYVGPLARGNSRFAWMTRKSEETITPWNFEEVVDKGASAQSFIERMTNFDKNLPNEKVLPKHSLLYEYFTVYNELTKVKYVTEGMRKPAFLSGEQKKAIVDLLFKTNRKVTVKQLKEDYFKKIECFDSVEISGVEDRFNASLGTYHDLLKIIKDKDFLDNEENEDILEDIVLTLTLFEDREMIEERLKTYAHLFDDKVMKQLKRRRYTGWGRLSRKLINGIRDKQSGKTILDFLKSDGFANRNFMQLIHDDSLTFKEDIQKAQVSGQGDSLHEHIANLAGSPAIKKGILQTVKVVDELVKVMGRHKPENIVIEMARENQTTQKGQKNSRERMKRIEEGIKELGSQILKEHPVENTQLQNEKLYLYYLQNGRDMYVDQELDINRLSDYDVDHIVPQSFLKDDSIDNKVLTRSDKARGKSDNVPSEEVVKKMKNYWRQLLNAKLITQRKFDNLTKAERGGLSELDKAGFIKRQLVETRQITKHVAQILDSRMNTKYDENDKLIREVKVITLKSKLVSDFRKDFQFYKVREINNYHHAHDAYLNAVVGTALIKKYPKLESEFVYGDYKVYDVRKMIAKSEQEIGKATAKYFFYSNIMNFFKTEITLANGEIRKRPLIETNGETGEIVWDKGRDFATVRKVLSMPQVNIVKKTEVQTGGFSKESILPKRNSDKLIARKKDWDPKKYGGFDSPTVAYSVLVVAKVEKGKSKKLKSVKELLGITIMERSSFEKNPIDFLEAKGYKEVKKDLIIKLPKYSLFELENGRKRMLASAGELQKGNELALPSKYVNFLYLASHYEKLKGSPEDNEQKQLFVEQHKHYLDEIIEQISEFSKRVILADANLDKVLSAYNKHRDKPIREQAENIIHLFTLTNLGAPAAFKYFDTTIDRKRYTSTKEVLDATLIHQSITGLYETRIDLSQLGGDGGEAAAKGGSPAPGGLLGRDLLTKLKAQIQFSTEGPQVTWEDRPAMCLVLNLEEEYRLHEKPVPPSIDPSWLQLFPMVWAEKAGMGLANQVPPVVVELKSDASPVAVRQYPMSKEAREGIRPHIQRFLDLGILVPCQSPWNTPLLPVKKPGTNDYRPVQDLREVNKRVQDIHPTVPNPYNLLSSLPPSHTWYSVLDLKDAFFCLKLHPNSQPLFAFEWRDPEKGNTGQLTWTRLPQGFKNSPTLFNEALHRDLASFRALNPQVVMLQYVDDLLVAAPTYRDCKEGTRRLLQELSKLGYRVSAKKAQLCREEVTYLGYLLKGGKRWLTPARKATVMKIPTPTTPRQVREFLGKAGFCRLFIPGFASLAAPLYPLTRPKVPFTWTEAHQEAFGRIKEALLSAPALALPDLTKPFALYVDEKEGVARGVLTQTLGPWRRPVAYLSKKLDPVASGWPTCLKAIAAVALLLKDADKLTLGQNVLVIAPHNLESIVRQPPDRWMTNARMTHYQSLLLNERVSFAPPAILNPATLLPVESDDTPIHICSEILAEETGTRPDLRDQPLPGVPAWYTDGSSFIMDGRRQAGAAIVDNKRTVWASNLPEGTSAQKAELIALTQALRLAEGKSINIYTDSRYAFATAHVHGAIYKQRGWLTSAGKDIKNKEEILALLEAIHLPKRVAIIHCPGHQRGTDPVATGNRKADEAAKQAAQSTRILTETTKNAGKRTADGSEFEKRTADGSEFESPKKKAKVE

SEQ ID NO: 7217 - protein, 2218 aa, synthetic construct
MPAAKRVKLDGGDKKYSIGLDIGTNSVGWAVITDEYKVPSKKFKVLGNTDRHSIKKNLIGALLFDSGETAEATRLKRTARRRYTRRKNRICYLQEIFSNEMAKVDDSFFHRLEESFLVEEDKKHERHPIFGNIVDEVAYHEKYPTIYHLRKKLVDSTDKADLRLIYLALAHMIKFRGHFLIEGDLNPDNSDVDKLFIQLVQTYNQLFEENPINASGVDAKAILSARLSKSRRLENLIAQLPGEKKNGLFGNLIALSLGLTPNFKSNFDLAEDAKLQLSKDTYDDDLDNLLAQIGDQYADLFLAAKNLSDAILLSDILRVNTEITKAPLSASMIKRYDEHHQDLTLLKALVRQQLPEKYKEIFFDQSKNGYAGYIDGGASQEEFYKFIKPILEKMDGTEELLVKLNREDLLRKQRTFDNGSIPHQIHLGELHAILRRQEDFYPFLKDNREKIEKILTFRIPYYVGPLARGNSRFAWMTRKSEETITPWNFEEVVDKGASAQSFIERMTNFDKNLPNEKVLPKHSLLYEYFTVYNELTKVKYVTEGMRKPAFLSGEQKKAIVDLLFKTNRKVTVKQLKEDYFKKIECFDSVEISGVEDRFNASLGTYHDLLKIIKDKDFLDNEENEDILEDIVLTLTLFEDREMIEERLKTYAHLFDDKVMKQLKRRRYTGWGRLSRKLINGIRDKQSGKTILDFLKSDGFANRNFMQLIHDDSLTFKEDIQKAQVSGQGDSLHEHIANLAGSPAIKKGILQTVKVVDELVKVMGRHKPENIVIEMARENQTTQKGQKNSRERMKRIEEGIKELGSQILKEHPVENTQLQNEKLYLYYLQNGRDMYVDQELDINRLSDYDVDHIVPQSFLKDDSIDNKVLTRSDKARGKSDNVPSEEVVKKMKNYWRQLLNAKLITQRKFDNLTKAERGGLSELDKAGFIKRQLVETRQITKHVAQILDSRMNTKYDENDKLIREVKVITLKSKLVSDFRKDFQFYKVREINNYHHAHDAYLNAVVGTALIKKYPKLESEFVYGDYKVYDVRKMIAKSEQEIGKATAKYFFYSNIMNFFKTEITLANGEIRKRPLIETNGETGEIVWDKGRDFATVRKVLSMPQVNIVKKTEVQTGGFSKESILPKRNSDKLIARKKDWDPKKYGGFDSPTVAYSVLVVAKVEKGKSKKLKSVKELLGITIMERSSFEKNPIDFLEAKGYKEVKKDLIIKLPKYSLFELENGRKRMLASAGELQKGNELALPSKYVNFLYLASHYEKLKGSPEDNEQKQLFVEQHKHYLDEIIEQISEFSKRVILADANLDKVLSAYNKHRDKPIREQAENIIHLFTLTNLGAPAAFKYFDTTIDRKRYTSTKEVLDATLIHQSITGLYETRIDLSQLGGDGGEAAAKGGSPAPGGTLGDQGSRGSDPLPEPRVTLTVEGIPTEFLVNTGAEHSVLTKPMGKMGSKRTVVAGATGSKVYPWTTKRLLKIGQKQVTHSFLVIPECPAPLLGRDLLTKLKAQIQFSTEGPQVTWEDRPAMCLVLNLEEEYRLHEKPVPPSIDPSWLQLFPMVWAEKAGMGLANQVPPVVVELKSDASPVAVRQYPMSKEAREGIRPHIQRFLDLGILVPCQSPWNTPLLPVKKPGTNDYRPVQDLREVNKRVQDIHPTVPNPYNLLSSLPPSHTWYSVLDLKDAFFCLKLHPNSQPLFAFEWRDPEKGNTGQLTWTRLPQGFKNSPTLFNEALHRDLASFRALNPQVVMLQYVDDLLVAAPTYRDCKEGTRRLLQELSKLGYRVSAKKAQLCREEVTYLGYLLKGGKRWLTPARKATVMKIPTPTTPRQVREFLGTAGFCRLWIPGFASLAAPLYPLTRPKVPFTWTEAHQEAFGRIKEALLSAPALALPDLTKPFALYVDEKEGVARGVLTQTLGPWRRPVAYLSKKLDPVASGWPTCLKAIAAVALLLKDADKLTLGQNVLVIAPHNLESIVRQPPDRWMTNARMTHYQSLLLNERVSFAPPAILNPATLLPVESDDTPIHICSEILAEETGTRPDLRDQPLPGVPAWYTDGSSFIMDGRRQAGAAIVDNKRTVWASNLPEGTSAQKAELIALTQALRLAEGKSINIYTDSRYAFATAHVHGAIYKQRGWLTSAGKDIKNKEEILALLEAIHLPKRVAIIHCPGHQRGTDPVATGNRKADEAAKQAAQSTRILTETTKNAGKRTADGSEFEKRTADGSEFESPKKKAKVE

SEQ ID NO: 7218 - protein, 2096 aa, synthetic construct
MPAAKRVKLDGGDKKYSIGLDIGTNSVGWAVITDEYKVPSKKFKVLGNTDRHSIKKNLIGALLFDSGETAEATRLKRTARRRYTRRKNRICYLQEIFSNEMAKVDDSFFHRLEESFLVEEDKKHERHPIFGNIVDEVAYHEKYPTIYHLRKKLVDSTDKADLRLIYLALAHMIKFRGHFLIEGDLNPDNSDVDKLFIQLVQTYNQLFEENPINASGVDAKAILSARLSKSRRLENLIAQLPGEKKNGLFGNLIALSLGLTPNFKSNFDLAEDAKLQLSKDTYDDDLDNLLAQIGDQYADLFLAAKNLSDAILLSDILRVNTEITKAPLSASMIKRYDEHHQDLTLLKALVRQQLPEKYKEIFFDQSKNGYAGYIDGGASQEEFYKFIKPILEKMDGTEELLVKLNREDLLRKQRTFDNGSIPHQIHLGELHAILRRQEDFYPFLKDNREKIEKILTFRIPYYVGPLARGNSRFAWMTRKSEETITPWNFEEVVDKGASAQSFIERMTNFDKNLPNEKVLPKHSLLYEYFTVYNELTKVKYVTEGMRKPAFLSGEQKKAIVDLLFKTNRKVTVKQLKEDYFKKIECFDSVEISGVEDRFNASLGTYHDLLKIIKDKDFLDNEENEDILEDIVLTLTLFEDREMIEERLKTYAHLFDDKVMKQLKRRRYTGWGRLSRKLINGIRDKQSGKTILDFLKSDGFANRNFMQLIHDDSLTFKEDIQKAQVSGQGDSLHEHIANLAGSPAIKKGILQTVKVVDELVKVMGRHKPENIVIEMARENQTTQKGQKNSRERMKRIEEGIKELGSQILKEHPVENTQLQNEKLYLYYLQNGRDMYVDQELDINRLSDYDVDHIVPQSFLKDDSIDNKVLTRSDKARGKSDNVPSEEVVKKMKNYWRQLLNAKLITQRKFDNLTKAERGGLSELDKAGFIKRQLVETRQITKHVAQILDSRMNTKYDENDKLIREVKVITLKSKLVSDFRKDFQFYKVREINNYHHAHDAYLNAVVGTALIKKYPKLESEFVYGDYKVYDVRKMIAKSEQEIGKATAKYFFYSNIMNFFKTEITLANGEIRKRPLIETNGETGEIVWDKGRDFATVRKVLSMPQVNIVKKTEVQTGGFSKESILPKRNSDKLIARKKDWDPKKYGGFDSPTVAYSVLVVAKVEKGKSKKLKSVKELLGITIMERSSFEKNPIDFLEAKGYKEVKKDLIIKLPKYSLFELENGRKRMLASAGELQKGNELALPSKYVNFLYLASHYEKLKGSPEDNEQKQLFVEQHKHYLDEIIEQISEFSKRVILADANLDKVLSAYNKHRDKPIREQAENIIHLFTLTNLGAPAAFKYFDTTIDRKRYTSTKEVLDATLIHQSITGLYETRIDLSQLGGDGGEAAAKGGSPAPGGTLNLEDEYRLYETSAEPEVSPGSTWLSDFPQAWAETGGMGLAVRQAPLIIPLKATSTPVSIKQYPMSQEAKLGIKPHIQRLLDQGILVPCQSPWNTPLLPVKKPGTNDYRPVQDLREVNKRVEDIHPTVPNPYNLLSGLPPSHRWYTVLDLKDAFFCLRLHPTSQPLFAFEWRDPGMGISGQLTWTRLPQGFKNSPTLFNEALHRDLADFRIQHPDLILLQYVDDILLAATSELDCQQGTRALLLTLGNLGYRASAKKAQLCQKQVKYLGYLLKEGQRWLTEARKETVMGQPTPKTPRQLREFLGTAGFCRLWIPGFAEMAAPLYPLTKPGTLFNWGPDQQKAYQEIKQALLTAPALGLPDLTKPFELFVDEKQGYAKGVLTQKLGPWRRPVAYLSKKLDPVAAGWPPCLRMVAAIAVLRKDAGKLTMGQPLVILAPHAVEALVKQPPDRWLSNARMTHYQAMLLDTDRVQFGPVVALNPATLLPLPEEGAPHDCLEILAETHGTRPDLTDQPIPDADHTWYTDGSSFLQEGQRKAGAAVTTETEVIWARALPAGTSAQRAELIALTQALKMAEGKRLNVYTDSRYAFATAHIHGEIYRRRGWLTSEGREIKNKSEILALLKALFLPKRLSIIHCLGHQKGDSAEARGNRLADQAAREAAIKTPPDTSTLLAGKRTADGSEFEKRTADGSEFESPKKKAKVE

SEQ ID NO: 7219 - protein, 2096 aa, synthetic construct
MPAAKRVKLDGGDKKYSIGLDIGTNSVGWAVITDEYKVPSKKFKVLGNTDRHSIKKNLIGALLFDSGETAEATRLKRTARRRYTRRKNRICYLQEIFSNEMAKVDDSFFHRLEESFLVEEDKKHERHPIFGNIVDEVAYHEKYPTIYHLRKKLVDSTDKADLRLIYLALAHMIKFRGHFLIEGDLNPDNSDVDKLFIQLVQTYNQLFEENPINASGVDAKAILSARLSKSRRLENLIAQLPGEKKNGLFGNLIALSLGLTPNFKSNFDLAEDAKLQLSKDTYDDDLDNLLAQIGDQYADLFLAAKNLSDAILLSDILRVNTEITKAPLSASMIKRYDEHHQDLTLLKALVRQQLPEKYKEIFFDQSKNGYAGYIDGGASQEEFYKFIKPILEKMDGTEELLVKLNREDLLRKQRTFDNGSIPHQIHLGELHAILRRQEDFYPFLKDNREKIEKILTFRIPYYVGPLARGNSRFAWMTRKSEETITPWNFEEVVDKGASAQSFIERMTNFDKNLPNEKVLPKHSLLYEYFTVYNELTKVKYVTEGMRKPAFLSGEQKKAIVDLLFKTNRKVTVKQLKEDYFKKIECFDSVEISGVEDRFNASLGTYHDLLKIIKDKDFLDNEENEDILEDIVLTLTLFEDREMIEERLKTYAHLFDDKVMKQLKRRRYTGWGRLSRKLINGIRDKQSGKTILDFLKSDGFANRNFMQLIHDDSLTFKEDIQKAQVSGQGDSLHEHIANLAGSPAIKKGILQTVKVVDELVKVMGRHKPENIVIEMARENQTTQKGQKNSRERMKRIEEGIKELGSQILKEHPVENTQLQNEKLYLYYLQNGRDMYVDQELDINRLSDYDVDHIVPQSFLKDDSIDNKVLTRSDKARGKSDNVPSEEVVKKMKNYWRQLLNAKLITQRKFDNLTKAERGGLSELDKAGFIKRQLVETRQITKHVAQILDSRMNTKYDENDKLIREVKVITLKSKLVSDFRKDFQFYKVREINNYHHAHDAYLNAVVGTALIKKYPKLESEFVYGDYKVYDVRKMIAKSEQEIGKATAKYFFYSNIMNFFKTEITLANGEIRKRPLIETNGETGEIVWDKGRDFATVRKVLSMPQVNIVKKTEVQTGGFSKESILPKRNSDKLIARKKDWDPKKYGGFDSPTVAYSVLVVAKVEKGKSKKLKSVKELLGITIMERSSFEKNPIDFLEAKGYKEVKKDLIIKLPKYSLFELENGRKRMLASAGELQKGNELALPSKYVNFLYLASHYEKLKGSPEDNEQKQLFVEQHKHYLDEIIEQISEFSKRVILADANLDKVLSAYNKHRDKPIREQAENIIHLFTLTNLGAPAAFKYFDTTIDRKRYTSTKEVLDATLIHQSITGLYETRIDLSQLGGDGGEAAAKGGSPAPGGTLNLEDEYRLYETSAEPEVSPGSTWLSDFPQAWAETGGMGLAVRQAPLIIPLKATSTPVSIKQYPMSQEAKLGIKPHIQRLLDQGILVPCQSPWNTPLLPVKKPGTNDYRPVQDLREVNKRVEDIHPTVPNPYNLLSGLPPSHRWYTVLDLKDAFFCLRLHPTSQPLFAFEWRDPGMGISGQLTWTRLPQGFKNSPTLFNEALHRDLADFRIQHPDLILLQYVDDILLAATSELDCQQGTRALLLTLGNLGYRASAKKAQLCQKQVKYLGYLLKEGQRWLTEARKETVMGQPTPKTPRQLREFLGKAGFCRLFIPGFAEMAAPLYPLTKPGTLFNWGPDQQKAYQEIKQALLTAPALGLPDLTKPFELFVDEKQGYAKGVLTQKLGPWRRPVAYLSKKLDPVAAGWPPCLRMVAAIAVLRKDAGKLTMGQPLVILAPHAVEALVKQPPDRWLSNARMTHYQAMLLDTDRVQFGPVVALNPATLLPLPEEGAPHDCLEILAETHGTRPDLTDQPIPDADHTWYTDGSSFLQEGQRKAGAAVTTETEVIWARALPAGTSAQRAELIALTQALKMAEGKRLNVYTDSRYAFATAHIHGEIYRRRGWLTSEGREIKNKSEILALLKALFLPKRLSIIHCLGHQKGDSAEARGNRLADQAAREAAIKTPPDTSTLLAGKRTADGSEFEKRTADGSEFESPKKKAKVE

SEQ ID NO: 7220 - protein, 2096 aa, synthetic construct
MPAAKRVKLDGGDKKYSIGLDIGTNSVGWAVITDEYKVPSKKFKVLGNTDRHSIKKNLIGALLFDSGETAEATRLKRTARRRYTRRKNRICYLQEIFSNEMAKVDDSFFHRLEESFLVEEDKKHERHPIFGNIVDEVAYHEKYPTIYHLRKKLVDSTDKADLRLIYLALAHMIKFRGHFLIEGDLNPDNSDVDKLFIQLVQTYNQLFEENPINASGVDAKAILSARLSKSRRLENLIAQLPGEKKNGLFGNLIALSLGLTPNFKSNFDLAEDAKLQLSKDTYDDDLDNLLAQIGDQYADLFLAAKNLSDAILLSDILRVNTEITKAPLSASMIKRYDEHHQDLTLLKALVRQQLPEKYKEIFFDQSKNGYAGYIDGGASQEEFYKFIKPILEKMDGTEELLVKLNREDLLRKQRTFDNGSIPHQIHLGELHAILRRQEDFYPFLKDNREKIEKILTFRIPYYVGPLARGNSRFAWMTRKSEETITPWNFEEVVDKGASAQSFIERMTNFDKNLPNEKVLPKHSLLYEYFTVYNELTKVKYVTEGMRKPAFLSGEQKKAIVDLLFKTNRKVTVKQLKEDYFKKIECFDSVEISGVEDRFNASLGTYHDLLKIIKDKDFLDNEENEDILEDIVLTLTLFEDREMIEERLKTYAHLFDDKVMKQLKRRRYTGWGRLSRKLINGIRDKQSGKTILDFLKSDGFANRNFMQLIHDDSLTFKEDIQKAQVSGQGDSLHEHIANLAGSPAIKKGILQTVKVVDELVKVMGRHKPENIVIEMARENQTTQKGQKNSRERMKRIEEGIKELGSQILKEHPVENTQLQNEKLYLYYLQNGRDMYVDQELDINRLSDYDVDHIVPQSFLKDDSIDNKVLTRSDKARGKSDNVPSEEVVKKMKNYWRQLLNAKLITQRKFDNLTKAERGGLSELDKAGFIKRQLVETRQITKHVAQILDSRMNTKYDENDKLIREVKVITLKSKLVSDFRKDFQFYKVREINNYHHAHDAYLNAVVGTALIKKYPKLESEFVYGDYKVYDVRKMIAKSEQEIGKATAKYFFYSNIMNFFKTEITLANGEIRKRPLIETNGETGEIVWDKGRDFATVRKVLSMPQVNIVKKTEVQTGGFSKESILPKRNSDKLIARKKDWDPKKYGGFDSPTVAYSVLVVAKVEKGKSKKLKSVKELLGITIMERSSFEKNPIDFLEAKGYKEVKKDLIIKLPKYSLFELENGRKRMLASAGELQKGNELALPSKYVNFLYLASHYEKLKGSPEDNEQKQLFVEQHKHYLDEIIEQISEFSKRVILADANLDKVLSAYNKHRDKPIREQAENIIHLFTLTNLGAPAAFKYFDTTIDRKRYTSTKEVLDATLIHQSITGLYETRIDLSQLGGDGGEAAAKGGSPAPGGTLGIEDEYRLHETSTEPDVSLGSTWLSDFPQAWAETGGMGLAVRQAPLIIPLKATSTPVSIQQYPMSHEARLGIKPHIQRLLDQGILVPCQSPWNTPLLPVKKPGTNDYRPVQDLREVNKRVEDIHPTVPNPYNLLSGLPPSHQWYTVLDLKDAFFCLRLHPTSQPLFAFEWRDPGMGISGQLTWTRLPQGFKNSPTLFNEALHRDLADFRIQHPDLILLQYVDDILLAATSELDCQQGTRALLQTLGDLGYRASAKKAQICQKQVKYLGYLLREGQRWLTEARKETVMGQPVPKTPRQLREFLGTAGFCRLWIPGFAEMAAPLYPLTKPGTLFSWGPDQQKAYQEIKQALLTAPALGLPDLTKPFELFVDEKQGYAKGVLTQKLGPWRRPVAYLSKKLDPVAAGWPPCLRMVAAIAVLTKDAGKLTMGQPLVILAPHAVEALVKQPPDRWLSNARMTHYQAMLLDTDRVQFGPVVALNPATLLPLPEEGAPHDCLEILAETHGTRPDLTDQPIPDADHTWYTDGSSFLQEGQRKAGAAVTTETEVIWAGALPAGTSAQRAELIALTQALKMAEGKRLNVYTDSRYAFATAHIHGEIYRRRGWLTSEGREIKNKSEILALLKALFLPKRLSIIHCLGHQKGDSAEARGNRLADQAAREAAIKTPPDTSTLLAGKRTADGSEFEKRTADGSEFESPKKKAKVE

SEQ ID NO: 7221 - protein, 2096 aa, synthetic construct
MPAAKRVKLDGGDKKYSIGLDIGTNSVGWAVITDEYKVPSKKFKVLGNTDRHSIKKNLIGALLFDSGETAEATRLKRTARRRYTRRKNRICYLQEIFSNEMAKVDDSFFHRLEESFLVEEDKKHERHPIFGNIVDEVAYHEKYPTIYHLRKKLVDSTDKADLRLIYLALAHMIKFRGHFLIEGDLNPDNSDVDKLFIQLVQTYNQLFEENPINASGVDAKAILSARLSKSRRLENLIAQLPGEKKNGLFGNLIALSLGLTPNFKSNFDLAEDAKLQLSKDTYDDDLDNLLAQIGDQYADLFLAAKNLSDAILLSDILRVNTEITKAPLSASMIKRYDEHHQDLTLLKALVRQQLPEKYKEIFFDQSKNGYAGYIDGGASQEEFYKFIKPILEKMDGTEELLVKLNREDLLRKQRTFDNGSIPHQIHLGELHAILRRQEDFYPFLKDNREKIEKILTFRIPYYVGPLARGNSRFAWMTRKSEETITPWNFEEVVDKGASAQSFIERMTNFDKNLPNEKVLPKHSLLYEYFTVYNELTKVKYVTEGMRKPAFLSGEQKKAIVDLLFKTNRKVTVKQLKEDYFKKIECFDSVEISGVEDRFNASLGTYHDLLKIIKDKDFLDNEENEDILEDIVLTLTLFEDREMIEERLKTYAHLFDDKVMKQLKRRRYTGWGRLSRKLINGIRDKQSGKTILDFLKSDGFANRNFMQLIHDDSLTFKEDIQKAQVSGQGDSLHEHIANLAGSPAIKKGILQTVKVVDELVKVMGRHKPENIVIEMARENQTTQKGQKNSRERMKRIEEGIKELGSQILKEHPVENTQLQNEKLYLYYLQNGRDMYVDQELDINRLSDYDVDHIVPQSFLKDDSIDNKVLTRSDKARGKSDNVPSEEVVKKMKNYWRQLLNAKLITQRKFDNLTKAERGGLSELDKAGFIKRQLVETRQITKHVAQILDSRMNTKYDENDKLIREVKVITLKSKLVSDFRKDFQFYKVREINNYHHAHDAYLNAVVGTALIKKYPKLESEFVYGDYKVYDVRKMIAKSEQEIGKATAKYFFYSNIMNFFKTEITLANGEIRKRPLIETNGETGEIVWDKGRDFATVRKVLSMPQVNIVKKTEVQTGGFSKESILPKRNSDKLIARKKDWDPKKYGGFDSPTVAYSVLVVAKVEKGKSKKLKSVKELLGITIMERSSFEKNPIDFLEAKGYKEVKKDLIIKLPKYSLFELENGRKRMLASAGELQKGNELALPSKYVNFLYLASHYEKLKGSPEDNEQKQLFVEQHKHYLDEIIEQISEFSKRVILADANLDKVLSAYNKHRDKPIREQAENIIHLFTLTNLGAPAAFKYFDTTIDRKRYTSTKEVLDATLIHQSITGLYETRIDLSQLGGDGGEAAAKGGSPAPGGTLNIEDEYRLHETSKGPDVPLGSTWLSDFPQAWAETGGMGLAVRQAPLIIPLKATSTPVSIKQYPMSQEARLGIKPHIQRLLDQGILVPCQSPWNTPLLPVKKPGTNDYRPVQDLREVNKRVEDIHPTVPNPYNLLSGLPPSHQWYTVLDLKDAFFCLRLHPTSQSLFAFEWRDPEMGISGQLTWTRLPQGFKNSPTLFDEALHRDLADFRIQHPDLILLQYVDDLLLAATSELDCQQGTRALLQTLGDLGYRASAKKAQICQKQVKYLGYLLKEGQRWLTEARKETVMGQPTPKTPRQLREFLGTAGFCRLWIPGFAEMAAPLYPLTKTGTLFEWGPDQQKAYQEIKQALLTAPALGLPDLTKPFELFVDEKQGYAKGVLTQKLGPWRRPVAYLSKKLDPVAAGWPPCLRMVAAIAVLTKDAGKLTMGQPLVILAPHAVEALVKQPPDRWLSNARMTHYQALLLDTDRVQFGPIVALNPATLLPLPEEGLQHDCLDILAEAHGTRPDLTDQPLPDADHTWYTDGSSFLQEGQRKAGAAVTTETEVVWAKALPAGTSAQRAELIALTQALKMAEGKKLNVYTDSRYAFATAHIHGEIYRRRGLLTSEGKEIKNKDEILALLKALFLPKRLSIIHCPGHQKGNRAEARGNRMADQAAREVATRETPETSTLLAGKRTADGSEFEKRTADGSEFESPKKKAKVE

SEQ ID NO: 7222 - protein, 2096 aa, synthetic construct
MPAAKRVKLDGGDKKYSIGLDIGTNSVGWAVITDEYKVPSKKFKVLGNTDRHSIKKNLIGALLFDSGETAEATRLKRTARRRYTRRKNRICYLQEIFSNEMAKVDDSFFHRLEESFLVEEDKKHERHPIFGNIVDEVAYHEKYPTIYHLRKKLVDSTDKADLRLIYLALAHMIKFRGHFLIEGDLNPDNSDVDKLFIQLVQTYNQLFEENPINASGVDAKAILSARLSKSRRLENLIAQLPGEKKNGLFGNLIALSLGLTPNFKSNFDLAEDAKLQLSKDTYDDDLDNLLAQIGDQYADLFLAAKNLSDAILLSDILRVNTEITKAPLSASMIKRYDEHHQDLTLLKALVRQQLPEKYKEIFFDQSKNGYAGYIDGGASQEEFYKFIKPILEKMDGTEELLVKLNREDLLRKQRTFDNGSIPHQIHLGELHAILRRQEDFYPFLKDNREKIEKILTFRIPYYVGPLARGNSRFAWMTRKSEETITPWNFEEVVDKGASAQSFIERMTNFDKNLPNEKVLPKHSLLYEYFTVYNELTKVKYVTEGMRKPAFLSGEQKKAIVDLLFKTNRKVTVKQLKEDYFKKIECFDSVEISGVEDRFNASLGTYHDLLKIIKDKDFLDNEENEDILEDIVLTLTLFEDREMIEERLKTYAHLFDDKVMKQLKRRRYTGWGRLSRKLINGIRDKQSGKTILDFLKSDGFANRNFMQLIHDDSLTFKEDIQKAQVSGQGDSLHEHIANLAGSPAIKKGILQTVKVVDELVKVMGRHKPENIVIEMARENQTTQKGQKNSRERMKRIEEGIKELGSQILKEHPVENTQLQNEKLYLYYLQNGRDMYVDQELDINRLSDYDVDHIVPQSFLKDDSIDNKVLTRSDKARGKSDNVPSEEVVKKMKNYWRQLLNAKLITQRKFDNLTKAERGGLSELDKAGFIKRQLVETRQITKHVAQILDSRMNTKYDENDKLIREVKVITLKSKLVSDFRKDFQFYKVREINNYHHAHDAYLNAVVGTALIKKYPKLESEFVYGDYKVYDVRKMIAKSEQEIGKATAKYFFYSNIMNFFKTEITLANGEIRKRPLIETNGETGEIVWDKGRDFATVRKVLSMPQVNIVKKTEVQTGGFSKESILPKRNSDKLIARKKDWDPKKYGGFDSPTVAYSVLVVAKVEKGKSKKLKSVKELLGITIMERSSFEKNPIDFLEAKGYKEVKKDLIIKLPKYSLFELENGRKRMLASAGELQKGNELALPSKYVNFLYLASHYEKLKGSPEDNEQKQLFVEQHKHYLDEIIEQISEFSKRVILADANLDKVLSAYNKHRDKPIREQAENIIHLFTLTNLGAPAAFKYFDTTIDRKRYTSTKEVLDATLIHQSITGLYETRIDLSQLGGDGGEAAAKGGSPAPGGTLNIEDEYRLHETSKGPDVPLGSTWLSDFPQAWAETGGMGLAVRQAPLIIPLKATSTPVSIKQYPMSQEARLGIKPHIQRLLDQGILVPCQSPWNTPLLPVKKPGTNDYRPVQDLREVNKRVEDIHPTVPNPYNLLSGLPPSHQWYTVLDLKDAFFCLRLHPTSQSLFAFEWRDPEMGISGQLTWTRLPQGFKNSPTLFNEALHRDLADFRIQHPDLILLQYVDDLLLAATSELDCQQGTRALLQTLGDLGYRASAKKAQICQKQVKYLGYLLKEGQRWLTEARKETVMGQPTPKTPRQLREFLGKAGFCRLFIPGFAEMAAPLYPLTKPGTLFEWGPDQQKAYQEIKQALLTAPALGLPDLTKPFELFVDEKQGYAKGVLTQKLGPWRRPVAYLSKKLDPVAAGWPPCLRMVAAIAVLTKDAGKLTMGQPLVILAPHAVEALVKQPPDRWLSNARMTHYQALLLDTDRVQFGPIVALNPATLLPLPEEGLQHDCLDILAEAHGTRPDLTDQPLPDADHTWYTDGSSFLQEGQRKAGAAVTTETEVVWAKALPAGTSAQRAELIALTQALKMAEGKKLNVYTDSRYAFATAHIHGEIYRRRGWLTSEGKEIKNKDEILALLKALFLPKRLSIIHCPGHQKGNRAEARGNRMADQAAREVATRETPETSTLLAGKRTADGSEFEKRTADGSEFESPKKKAKVE

SEQ ID NO: 7223 - protein, 2087 aa, synthetic construct
MPAAKRVKLDGGDKKYSIGLDIGTNSVGWAVITDEYKVPSKKFKVLGNTDRHSIKKNLIGALLFDSGETAEATRLKRTARRRYTRRKNRICYLQEIFSNEMAKVDDSFFHRLEESFLVEEDKKHERHPIFGNIVDEVAYHEKYPTIYHLRKKLVDSTDKADLRLIYLALAHMIKFRGHFLIEGDLNPDNSDVDKLFIQLVQTYNQLFEENPINASGVDAKAILSARLSKSRRLENLIAQLPGEKKNGLFGNLIALSLGLTPNFKSNFDLAEDAKLQLSKDTYDDDLDNLLAQIGDQYADLFLAAKNLSDAILLSDILRVNTEITKAPLSASMIKRYDEHHQDLTLLKALVRQQLPEKYKEIFFDQSKNGYAGYIDGGASQEEFYKFIKPILEKMDGTEELLVKLNREDLLRKQRTFDNGSIPHQIHLGELHAILRRQEDFYPFLKDNREKIEKILTFRIPYYVGPLARGNSRFAWMTRKSEETITPWNFEEVVDKGASAQSFIERMTNFDKNLPNEKVLPKHSLLYEYFTVYNELTKVKYVTEGMRKPAFLSGEQKKAIVDLLFKTNRKVTVKQLKEDYFKKIECFDSVEISGVEDRFNASLGTYHDLLKIIKDKDFLDNEENEDILEDIVLTLTLFEDREMIEERLKTYAHLFDDKVMKQLKRRRYTGWGRLSRKLINGIRDKQSGKTILDFLKSDGFANRNFMQLIHDDSLTFKEDIQKAQVSGQGDSLHEHIANLAGSPAIKKGILQTVKVVDELVKVMGRHKPENIVIEMARENQTTQKGQKNSRERMKRIEEGIKELGSQILKEHPVENTQLQNEKLYLYYLQNGRDMYVDQELDINRLSDYDVDHIVPQSFLKDDSIDNKVLTRSDKARGKSDNVPSEEVVKKMKNYWRQLLNAKLITQRKFDNLTKAERGGLSELDKAGFIKRQLVETRQITKHVAQILDSRMNTKYDENDKLIREVKVITLKSKLVSDFRKDFQFYKVREINNYHHAHDAYLNAVVGTALIKKYPKLESEFVYGDYKVYDVRKMIAKSEQEIGKATAKYFFYSNIMNFFKTEITLANGEIRKRPLIETNGETGEIVWDKGRDFATVRKVLSMPQVNIVKKTEVQTGGFSKESILPKRNSDKLIARKKDWDPKKYGGFDSPTVAYSVLVVAKVEKGKSKKLKSVKELLGITIMERSSFEKNPIDFLEAKGYKEVKKDLIIKLPKYSLFELENGRKRMLASAGELQKGNELALPSKYVNFLYLASHYEKLKGSPEDNEQKQLFVEQHKHYLDEIIEQISEFSKRVILADANLDKVLSAYNKHRDKPIREQAENIIHLFTLTNLGAPAAFKYFDTTIDRKRYTSTKEVLDATLIHQSITGLYETRIDLSQLGGDGGEAAAKGGSPAPGGIPWLMKKPLQLTTLVPLQEYEERLLKQTMLTGSYKEKLQSLFLKYDALWQHWENQVGHRRIKPHHIATGTVNPRPQKQYPINPKAKASIQTVINDLLKQGVLIQQNSIMNTPVYPVPKPDGKWRMVLDYREVNKTIPLIAAQNQHSAGILSSIFRGKYKTTLDLSNGFWAHSITPESYWLTAFTWLGQQYCWTRLPQGFLNSPALFTADVVDLLKEVPNVQVYVDDIYISHDDPREHLEQLEKVFSLLLNAGYVVSLKKSEIAQHEVEFLGFNITKEGRGLTETFKQKLLNITPPRDLKQLQSILGLLNFARNFIPNFSELVKPLYNIIATANGKYITWTTDNSQQLQNIISMLNSAENLEERNPEVRLIMKVNTSPSAGYIRFYNEFAKRPIMYLNYVYTKAEVKFTNTEKLLTTIHKGLIKALDLGMGQEILVYSPIVSMTKIQKTPLPERKALPIRWITWMSYLEDPRIQFHYDKTLPELQQVPTVTDDIIAKIKHPSEFSMVFYTDGSAIKHPNVNKSHNAGMGIAQVQFKPEFTVINTWSIPLGDHTAQLAEVAAVEFACKKALKIDGPVLIVTDSFYVAESVNKELPYWQSNGFFNNKKKPLKHVSKWKSIADCIQLKPDIIIIHEKGHQPTASTFHTEGNNLADKLATQGSYVVNAGKRTADGSEFEKRTADGSEFESPKKKAKVE

SEQ ID NO: 7224 - protein, 2087 aa, synthetic construct
MPAAKRVKLDGGDKKYSIGLDIGTNSVGWAVITDEYKVPSKKFKVLGNTDRHSIKKNLIGALLFDSGETAEATRLKRTARRRYTRRKNRICYLQEIFSNEMAKVDDSFFHRLEESFLVEEDKKHERHPIFGNIVDEVAYHEKYPTIYHLRKKLVDSTDKADLRLIYLALAHMIKFRGHFLIEGDLNPDNSDVDKLFIQLVQTYNQLFEENPINASGVDAKAILSARLSKSRRLENLIAQLPGEKKNGLFGNLIALSLGLTPNFKSNFDLAEDAKLQLSKDTYDDDLDNLLAQIGDQYADLFLAAKNLSDAILLSDILRVNTEITKAPLSASMIKRYDEHHQDLTLLKALVRQQLPEKYKEIFFDQSKNGYAGYIDGGASQEEFYKFIKPILEKMDGTEELLVKLNREDLLRKQRTFDNGSIPHQIHLGELHAILRRQEDFYPFLKDNREKIEKILTFRIPYYVGPLARGNSRFAWMTRKSEETITPWNFEEVVDKGASAQSFIERMTNFDKNLPNEKVLPKHSLLYEYFTVYNELTKVKYVTEGMRKPAFLSGEQKKAIVDLLFKTNRKVTVKQLKEDYFKKIECFDSVEISGVEDRFNASLGTYHDLLKIIKDKDFLDNEENEDILEDIVLTLTLFEDREMIEERLKTYAHLFDDKVMKQLKRRRYTGWGRLSRKLINGIRDKQSGKTILDFLKSDGFANRNFMQLIHDDSLTFKEDIQKAQVSGQGDSLHEHIANLAGSPAIKKGILQTVKVVDELVKVMGRHKPENIVIEMARENQTTQKGQKNSRERMKRIEEGIKELGSQILKEHPVENTQLQNEKLYLYYLQNGRDMYVDQELDINRLSDYDVDHIVPQSFLKDDSIDNKVLTRSDKARGKSDNVPSEEVVKKMKNYWRQLLNAKLITQRKFDNLTKAERGGLSELDKAGFIKRQLVETRQITKHVAQILDSRMNTKYDENDKLIREVKVITLKSKLVSDFRKDFQFYKVREINNYHHAHDAYLNAVVGTALIKKYPKLESEFVYGDYKVYDVRKMIAKSEQEIGKATAKYFFYSNIMNFFKTEITLANGEIRKRPLIETNGETGEIVWDKGRDFATVRKVLSMPQVNIVKKTEVQTGGFSKESILPKRNSDKLIARKKDWDPKKYGGFDSPTVAYSVLVVAKVEKGKSKKLKSVKELLGITIMERSSFEKNPIDFLEAKGYKEVKKDLIIKLPKYSLFELENGRKRMLASAGELQKGNELALPSKYVNFLYLASHYEKLKGSPEDNEQKQLFVEQHKHYLDEIIEQISEFSKRVILADANLDKVLSAYNKHRDKPIREQAENIIHLFTLTNLGAPAAFKYFDTTIDRKRYTSTKEVLDATLIHQSITGLYETRIDLSQLGGDGGEAAAKGGSPAPGGIPWLMKKPLQLTTLVPLQEYEERLLKQTMLTGSYKEKLQSLFLKYDALWQHWENQVGHRRIKPHHIATGTVNPRPQKQYPINPKAKASIQTVINDLLKQGVLIQQNSIMNTPVYPVPKPDGKWRMVLDYREVNKTIPLIAAQNQHSAGILSSIFRGKYKTTLDLSNGFWAHSITPESYWLTAFTWLGQQYCWTRLPQGFLNSPALFNADVVDLLKEVPNVQVYVDDIYISHDDPREHLEQLEKVFSLLLNAGYVVSLKKSEIAQHEVEFLGFNITKEGRGLTETFKQKLLNITPPRDLKQLQSILGLLNFARNFIPNFSELVKPLYNIIATAPGKYITWTTDNSQQLQNIISMLNSAENLEERNPEVRLIMKVNTSPSAGYIRFYNEFAKRPIMYLNYVYTKAEVKFTNTEKLLTTIHKGLIKALDLGMGQEILVYSPIVSMTKIQKTPLPERKALPIRWITWMSYLEDPRIQFHYDKTLPELQQVPTVTDDIIAKIKHPSEFSMVFYTDGSAIKHPNVNKSHNAGMGIAQVQFKPEFTVINTWSIPLGDHTAQLAEVAAVEFACKKALKIDGPVLIVTDSFYVAESVNKELPYWQSNGFFNNKKKPLKHVSKWKSIADCIQLKPDIIIIHEKGHQPTASTFHTEGNNLADKLATQGSYVVNAGKRTADGSEFEKRTADGSEFESPKKKAKVE

SEQ ID NO: 7225 - protein, 2094 aa, synthetic construct
MPAAKRVKLDGGDKKYSIGLDIGTNSVGWAVITDEYKVPSKKFKVLGNTDRHSIKKNLIGALLFDSGETAEATRLKRTARRRYTRRKNRICYLQEIFSNEMAKVDDSFFHRLEESFLVEEDKKHERHPIFGNIVDEVAYHEKYPTIYHLRKKLVDSTDKADLRLIYLALAHMIKFRGHFLIEGDLNPDNSDVDKLFIQLVQTYNQLFEENPINASGVDAKAILSARLSKSRRLENLIAQLPGEKKNGLFGNLIALSLGLTPNFKSNFDLAEDAKLQLSKDTYDDDLDNLLAQIGDQYADLFLAAKNLSDAILLSDILRVNTEITKAPLSASMIKRYDEHHQDLTLLKALVRQQLPEKYKEIFFDQSKNGYAGYIDGGASQEEFYKFIKPILEKMDGTEELLVKLNREDLLRKQRTFDNGSIPHQIHLGELHAILRRQEDFYPFLKDNREKIEKILTFRIPYYVGPLARGNSRFAWMTRKSEETITPWNFEEVVDKGASAQSFIERMTNFDKNLPNEKVLPKHSLLYEYFTVYNELTKVKYVTEGMRKPAFLSGEQKKAIVDLLFKTNRKVTVKQLKEDYFKKIECFDSVEISGVEDRFNASLGTYHDLLKIIKDKDFLDNEENEDILEDIVLTLTLFEDREMIEERLKTYAHLFDDKVMKQLKRRRYTGWGRLSRKLINGIRDKQSGKTILDFLKSDGFANRNFMQLIHDDSLTFKEDIQKAQVSGQGDSLHEHIANLAGSPAIKKGILQTVKVVDELVKVMGRHKPENIVIEMARENQTTQKGQKNSRERMKRIEEGIKELGSQILKEHPVENTQLQNEKLYLYYLQNGRDMYVDQELDINRLSDYDVDHIVPQSFLKDDSIDNKVLTRSDKARGKSDNVPSEEVVKKMKNYWRQLLNAKLITQRKFDNLTKAERGGLSELDKAGFIKRQLVETRQITKHVAQILDSRMNTKYDENDKLIREVKVITLKSKLVSDFRKDFQFYKVREINNYHHAHDAYLNAVVGTALIKKYPKLESEFVYGDYKVYDVRKMIAKSEQEIGKATAKYFFYSNIMNFFKTEITLANGEIRKRPLIETNGETGEIVWDKGRDFATVRKVLSMPQVNIVKKTEVQTGGFSKESILPKRNSDKLIARKKDWDPKKYGGFDSPTVAYSVLVVAKVEKGKSKKLKSVKELLGITIMERSSFEKNPIDFLEAKGYKEVKKDLIIKLPKYSLFELENGRKRMLASAGELQKGNELALPSKYVNFLYLASHYEKLKGSPEDNEQKQLFVEQHKHYLDEIIEQISEFSKRVILADANLDKVLSAYNKHRDKPIREQAENIIHLFTLTNLGAPAAFKYFDTTIDRKRYTSTKEVLDATLIHQSITGLYETRIDLSQLGGDGGEAAAKGGSPAPGGVLNLEEEYRLHEKPVPSSIDPSWLQLFPTVWAERAGMGLANQVPPVVVELRSGASPVAVRQYPMSKEAREGIRPHIQRFLDLGVLVPCQSPWNTPLLPVKKPGTNDYRPVQDLREINKRVQDIHPTVPNPYNLLSSLPPSHTWYSVLDLKDAFFCLKLHPNSQPLFAFEWRDPEKGNTGQLTWTRLPQGFKNSPTLFDEALHRDLAPFRALNPQVVLLQYVDDLLVAAPTYRDCKEGTQKLLQELSKLGYRVSAKKAQLCQKEVTYLGYLLKEGKRWLTPARKATVMKIPPPTTPRQVREFLGTAGFCRLWIPGFASLAAPLYPLTKESIPFIWTEEHQKAFDRIKEALLSAPALALPDLTKPFTLYVDERAGVARGVLTQTLGPWRRPVAYLSKKLDPVASGWPTCLKAVAAVALLLKDADKLTLGQNVTVIASHSLESIVRQPPDRWMTNARMTHYQSLLLNERVSFAPPAVLNPATLLPVESEATPVHRCSEILAEETGTRRDLKDQPLPGVPAWYTDGSSFIAEGKRRAGAAIVDGKRTVWASSLPEGTSAQKAELVALTQALRLAEGKDINIYTDSRYAFATAHIHGAIYKQRGLLTSAGKDIKNKEEILALLEAIHLPKRVAIIHCPGHQKGNDPVATGNRRADEAAKQAALSTRVLAETTKPAGKRTADGSEFEKRTADGSEFESPKKKAKVE

SEQ ID NO: 7226 - protein, 2094 aa, synthetic construct
MPAAKRVKLDGGDKKYSIGLDIGTNSVGWAVITDEYKVPSKKFKVLGNTDRHSIKKNLIGALLFDSGETAEATRLKRTARRRYTRRKNRICYLQEIFSNEMAKVDDSFFHRLEESFLVEEDKKHERHPIFGNIVDEVAYHEKYPTIYHLRKKLVDSTDKADLRLIYLALAHMIKFRGHFLIEGDLNPDNSDVDKLFIQLVQTYNQLFEENPINASGVDAKAILSARLSKSRRLENLIAQLPGEKKNGLFGNLIALSLGLTPNFKSNFDLAEDAKLQLSKDTYDDDLDNLLAQIGDQYADLFLAAKNLSDAILLSDILRVNTEITKAPLSASMIKRYDEHHQDLTLLKALVRQQLPEKYKEIFFDQSKNGYAGYIDGGASQEEFYKFIKPILEKMDGTEELLVKLNREDLLRKQRTFDNGSIPHQIHLGELHAILRRQEDFYPFLKDNREKIEKILTFRIPYYVGPLARGNSRFAWMTRKSEETITPWNFEEVVDKGASAQSFIERMTNFDKNLPNEKVLPKHSLLYEYFTVYNELTKVKYVTEGMRKPAFLSGEQKKAIVDLLFKTNRKVTVKQLKEDYFKKIECFDSVEISGVEDRFNASLGTYHDLLKIIKDKDFLDNEENEDILEDIVLTLTLFEDREMIEERLKTYAHLFDDKVMKQLKRRRYTGWGRLSRKLINGIRDKQSGKTILDFLKSDGFANRNFMQLIHDDSLTFKEDIQKAQVSGQGDSLHEHIANLAGSPAIKKGILQTVKVVDELVKVMGRHKPENIVIEMARENQTTQKGQKNSRERMKRIEEGIKELGSQILKEHPVENTQLQNEKLYLYYLQNGRDMYVDQELDINRLSDYDVDHIVPQSFLKDDSIDNKVLTRSDKARGKSDNVPSEEVVKKMKNYWRQLLNAKLITQRKFDNLTKAERGGLSELDKAGFIKRQLVETRQITKHVAQILDSRMNTKYDENDKLIREVKVITLKSKLVSDFRKDFQFYKVREINNYHHAHDAYLNAVVGTALIKKYPKLESEFVYGDYKVYDVRKMIAKSEQEIGKATAKYFFYSNIMNFFKTEITLANGEIRKRPLIETNGETGEIVWDKGRDFATVRKVLSMPQVNIVKKTEVQTGGFSKESILPKRNSDKLIARKKDWDPKKYGGFDSPTVAYSVLVVAKVEKGKSKKLKSVKELLGITIMERSSFEKNPIDFLEAKGYKEVKKDLIIKLPKYSLFELENGRKRMLASAGELQKGNELALPSKYVNFLYLASHYEKLKGSPEDNEQKQLFVEQHKHYLDEIIEQISEFSKRVILADANLDKVLSAYNKHRDKPIREQAENIIHLFTLTNLGAPAAFKYFDTTIDRKRYTSTKEVLDATLIHQSITGLYETRIDLSQLGGDGGEAAAKGGSPAPGGVLNLEEEYRLHEKPVPSSIDPSWLQLFPTVWAERAGMGLANQVPPVVVELRSGASPVAVRQYPMSKEAREGIRPHIQRFLDLGVLVPCQSPWNTPLLPVKKPGTNDYRPVQDLREINKRVQDIHPTVPNPYNLLSSLPPSHTWYSVLDLKDAFFCLKLHPNSQPLFAFEWRDPEKGNTGQLTWTRLPQGFKNSPTLFNEALHRDLAPFRALNPQVVLLQYVDDLLVAAPTYRDCKEGTQKLLQELSKLGYRVSAKKAQLCQKEVTYLGYLLKEGKRWLTPARKATVMKIPPPTTPRQVREFLGKAGFCRLFIPGFASLAAPLYPLTKPSIPFIWTEEHQKAFDRIKEALLSAPALALPDLTKPFTLYVDERAGVARGVLTQTLGPWRRPVAYLSKKLDPVASGWPTCLKAVAAVALLLKDADKLTLGQNVTVIASHSLESIVRQPPDRWMTNARMTHYQSLLLNERVSFAPPAVLNPATLLPVESEATPVHRCSEILAEETGTRRDLKDQPLPGVPAWYTDGSSFIAEGKRRAGAAIVDGKRTVWASSLPEGTSAQKAELVALTQALRLAEGKDINIYTDSRYAFATAHIHGAIYKQRGWLTSAGKDIKNKEEILALLEAIHLPKRVAIIHCPGHQKGNDPVATGNRRADEAAKQAALSTRVLAETTKPAGKRTADGSEFEKRTADGSEFESPKKKAKVE

SEQ ID NO: 7227 - protein, 2096 aa, synthetic construct
MPAAKRVKLDGGDKKYSIGLDIGTNSVGWAVITDEYKVPSKKFKVLGNTDRHSIKKNLIGALLFDSGETAEATRLKRTARRRYTRRKNRICYLQEIFSNEMAKVDDSFFHRLEESFLVEEDKKHERHPIFGNIVDEVAYHEKYPTIYHLRKKLVDSTDKADLRLIYLALAHMIKFRGHFLIEGDLNPDNSDVDKLFIQLVQTYNQLFEENPINASGVDAKAILSARLSKSRRLENLIAQLPGEKKNGLFGNLIALSLGLTPNFKSNFDLAEDAKLQLSKDTYDDDLDNLLAQIGDQYADLFLAAKNLSDAILLSDILRVNTEITKAPLSASMIKRYDEHHQDLTLLKALVRQQLPEKYKEIFFDQSKNGYAGYIDGGASQEEFYKFIKPILEKMDGTEELLVKLNREDLLRKQRTFDNGSIPHQIHLGELHAILRRQEDFYPFLKDNREKIEKILTFRIPYYVGPLARGNSRFAWMTRKSEETITPWNFEEVVDKGASAQSFIERMTNFDKNLPNEKVLPKHSLLYEYFTVYNELTKVKYVTEGMRKPAFLSGEQKKAIVDLLFKTNRKVTVKQLKEDYFKKIECFDSVEISGVEDRFNASLGTYHDLLKIIKDKDFLDNEENEDILEDIVLTLTLFEDREMIEERLKTYAHLFDDKVMKQLKRRRYTGWGRLSRKLINGIRDKQSGKTILDFLKSDGFANRNFMQLIHDDSLTFKEDIQKAQVSGQGDSLHEHIANLAGSPAIKKGILQTVKVVDELVKVMGRHKPENIVIEMARENQTTQKGQKNSRERMKRIEEGIKELGSQILKEHPVENTQLQNEKLYLYYLQNGRDMYVDQELDINRLSDYDVDHIVPQSFLKDDSIDNKVLTRSDKARGKSDNVPSEEVVKKMKNYWRQLLNAKLITQRKFDNLTKAERGGLSELDKAGFIKRQLVETRQITKHVAQILDSRMNTKYDENDKLIREVKVITLKSKLVSDFRKDFQFYKVREINNYHHAHDAYLNAVVGTALIKKYPKLESEFVYGDYKVYDVRKMIAKSEQEIGKATAKYFFYSNIMNFFKTEITLANGEIRKRPLIETNGETGEIVWDKGRDFATVRKVLSMPQVNIVKKTEVQTGGFSKESILPKRNSDKLIARKKDWDPKKYGGFDSPTVAYSVLVVAKVEKGKSKKLKSVKELLGITIMERSSFEKNPIDFLEAKGYKEVKKDLIIKLPKYSLFELENGRKRMLASAGELQKGNELALPSKYVNFLYLASHYEKLKGSPEDNEQKQLFVEQHKHYLDEIIEQISEFSKRVILADANLDKVLSAYNKHRDKPIREQAENIIHLFTLTNLGAPAAFKYFDTTIDRKRYTSTKEVLDATLIHQSITGLYETRIDLSQLGGDGGEAAAKGGSPAPGGTLNIEDEYRLHETSKEPDVPLGSTWLSDFPQAWAETGGMGLAVRQAPLIIPLKATSTPVSIKQYPMSQEARLGIKPHIQRLLDQGILVPCQSPWNTPLLPVKKPGTNDYRPVQDLREVNKRVEDIHPTVPNPYNLLSGLPPSHQWYTVLDLKDAFFCLRLHPTSQPLFAFEWRDPEMGISGQLTWTRLPQGFKNSPTLFNEALHRDLADFRIQHPDLILLQYVDDLLLAATSEQDCQRGTRALLQTLGNLGYRASAKKAQICQKQVKYLGYLLKEGQRWLTEARKETVMGQPTPKTPRQLREFLGTAGFCRLWIPGFAEMAAPLYPLTKPGTLFNWGPDQQKAYQEIKQALLTAPALGLPDLTKPFELFVDEKQGYAKGVLTQKLGPWRRPVAYLSKKLDPVAAGWPPCLRMVAAIAVLTKDAGKLTMGQPLVILAPHAVEALVKQPPDRWLSNARMTHYQAMLLDTDRVQFGPVVALNPATLLPLPEKEAPHDCLEILAETHGTRPDLTDQPIPDADYTWYTDGSSFLQEGQRRAGAAVTTETEVIWARALPAGTSAQRAELIALTQALKMAEGKKLNVYTDSRYAFATAHVHGEIYRRRGWLTSEGREIKNKNEILALLKALFLPKRLSIIHCPGHQKGNSAEARGNRMADQAAREAAMKAVLETSTLLAGKRTADGSEFEKRTADGSEFESPKKKAKVE

SEQ ID NO: 7228 - protein, 2087 aa, synthetic construct
MPAAKRVKLDGGDKKYSIGLDIGTNSVGWAVITDEYKVPSKKFKVLGNTDRHSIKKNLIGALLFDSGETAEATRLKRTARRRYTRRKNRICYLQEIFSNEMAKVDDSFFHRLEESFLVEEDKKHERHPIFGNIVDEVAYHEKYPTIYHLRKKLVDSTDKADLRLIYLALAHMIKFRGHFLIEGDLNPDNSDVDKLFIQLVQTYNQLFEENPINASGVDAKAILSARLSKSRRLENLIAQLPGEKKNGLFGNLIALSLGLTPNFKSNFDLAEDAKLQLSKDTYDDDLDNLLAQIGDQYADLFLAAKNLSDAILLSDILRVNTEITKAPLSASMIKRYDEHHQDLTLLKALVRQQLPEKYKEIFFDQSKNGYAGYIDGGASQEEFYKFIKPILEKMDGTEELLVKLNREDLLRKQRTFDNGSIPHQIHLGELHAILRRQEDFYPFLKDNREKIEKILTFRIPYYVGPLARGNSRFAWMTRKSEETITPWNFEEVVDKGASAQSFIERMTNFDKNLPNEKVLPKHSLLYEYFTVYNELTKVKYVTEGMRKPAFLSGEQKKAIVDLLFKTNRKVTVKQLKEDYFKKIECFDSVEISGVEDRFNASLGTYHDLLKIIKDKDFLDNEENEDILEDIVLTLTLFEDREMIEERLKTYAHLFDDKVMKQLKRRRYTGWGRLSRKLINGIRDKQSGKTILDFLKSDGFANRNFMQLIHDDSLTFKEDIQKAQVSGQGDSLHEHIANLAGSPAIKKGILQTVKVVDELVKVMGRHKPENIVIEMARENQTTQKGQKNSRERMKRIEEGIKELGSQILKEHPVENTQLQNEKLYLYYLQNGRDMYVDQELDINRLSDYDVDHIVPQSFLKDDSIDNKVLTRSDKARGKSDNVPSEEVVKKMKNYWRQLLNAKLITQRKFDNLTKAERGGLSELDKAGFIKRQLVETRQITKHVAQILDSRMNTKYDENDKLIREVKVITLKSKLVSDFRKDFQFYKVREINNYHHAHDAYLNAVVGTALIKKYPKLESEFVYGDYKVYDVRKMIAKSEQEIGKATAKYFFYSNIMNFFKTEITLANGEIRKRPLIETNGETGEIVWDKGRDFATVRKVLSMPQVNIVKKTEVQTGGFSKESILPKRNSDKLIARKKDWDPKKYGGFDSPTVAYSVLVVAKVEKGKSKKLKSVKELLGITIMERSSFEKNPIDFLEAKGYKEVKKDLIIKLPKYSLFELENGRKRMLASAGELQKGNELALPSKYVNFLYLASHYEKLKGSPEDNEQKQLFVEQHKHYLDEIIEQISEFSKRVILADANLDKVLSAYNKHRDKPIREQAENIIHLFTLTNLGAPAAFKYFDTTIDRKRYTSTKEVLDATLIHQSITGLYETRIDLSQLGGDGGEAAAKPAPGGSGGVPWILKKPLELTIKLDLEEQQGTLLNNSILSKKGKEELKQLFEKYSALWQSWENQVGHRRIRPHKIATGTVKPTPQKQYHINPKAKPDIQIVINDLLKQGVLIQKESTMNTPVYPVPKPNGRWRMVLDYRAVNKVTPLIAVQNQHSYGILGSLFKGRYKTTIDLSNGFWAHPIVPEDYWITAFTWQGKQYCWTVLPQGFLNSPGLFNGDVVDLLQGIPNVEVYVDDVYISHDSEKEHLEYLDILFNRLKEAGYIISLKKSNIANSIVDFLGFQITNEGRGLTDTFKEKLENITAPTTLKQLQSILGLLNFARNFIPDFTELIAPLYALIPKSPKNYVPWQIEHSTTLETLITKLNGAEYLQGRKGDKTLIMKVNASYTTGYIRYYNEGEKKPISYVSIVFSKTELKFTELEKLLTTVHKGLLKALDLSMGQNIHVYSPIVSMQNIQKTPQTAKKALASRWLSWLSYLEDPRIRFFYDPQMPALKDLPAVDTGKDNKKHPSNFQHIFYTDGSAITSPTKEGHLNAGMGIVYFINKDGNLQKQQEWSISLGNHTAQFAEIAAFEFALKKCLPLGGNILVVTDSNYVAKAYNEELDVWASNGFVNNRKKPLKHISKWKSVADLKRLRPDVVVTHEPGHQKLDSSPHAYGNNLADQLATQASFKVHAGKRTADGSEFEKRTADGSEFESPKKKAKVE

SEQ ID NO: 7229 - protein, 2176 aa, synthetic construct
MPAAKRVKLDGGDKKYSIGLDIGTNSVGWAVITDEYKVPSKKFKVLGNTDRHSIKKNLIGALLFDSGETAEATRLKRTARRRYTRRKNRICYLQEIFSNEMAKVDDSFFHRLEESFLVEEDKKHERHPIFGNIVDEVAYHEKYPTIYHLRKKLVDSTDKADLRLIYLALAHMIKFRGHFLIEGDLNPDNSDVDKLFIQLVQTYNQLFEENPINASGVDAKAILSARLSKSRRLENLIAQLPGEKKNGLFGNLIALSLGLTPNFKSNFDLAEDAKLQLSKDTYDDDLDNLLAQIGDQYADLFLAAKNLSDAILLSDILRVNTEITKAPLSASMIKRYDEHHQDLTLLKALVRQQLPEKYKEIFFDQSKNGYAGYIDGGASQEEFYKFIKPILEKMDGTEELLVKLNREDLLRKQRTFDNGSIPHQIHLGELHAILRRQEDFYPFLKDNREKIEKILTFRIPYYVGPLARGNSRFAWMTRKSEETITPWNFEEVVDKGASAQSFIERMTNFDKNLPNEKVLPKHSLLYEYFTVYNELTKVKYVTEGMRKPAFLSGEQKKAIVDLLFKTNRKVTVKQLKEDYFKKIECFDSVEISGVEDRFNASLGTYHDLLKIIKDKDFLDNEENEDILEDIVLTLTLFEDREMIEERLKTYAHLFDDKVMKQLKRRRYTGWGRLSRKLINGIRDKQSGKTILDFLKSDGFANRNFMQLIHDDSLTFKEDIQKAQVSGQGDSLHEHIANLAGSPAIKKGILQTVKVVDELVKVMGRHKPENIVIEMARENQTTQKGQKNSRERMKRIEEGIKELGSQILKEHPVENTQLQNEKLYLYYLQNGRDMYVDQELDINRLSDYDVDHIVPQSFLKDDSIDNKVLTRSDKARGKSDNVPSEEVVKKMKNYWRQLLNAKLITQRKFDNLTKAERGGLSELDKAGFIKRQLVETRQITKHVAQILDSRMNTKYDENDKLIREVKVITLKSKLVSDFRKDFQFYKVREINNYHHAHDAYLNAVVGTALIKKYPKLESEFVYGDYKVYDVRKMIAKSEQEIGKATAKYFFYSNIMNFFKTEITLANGEIRKRPLIETNGETGEIVWDKGRDFATVRKVLSMPQVNIVKKTEVQTGGFSKESILPKRNSDKLIARKKDWDPKKYGGFDSPTVAYSVLVVAKVEKGKSKKLKSVKELLGITIMERSSFEKNPIDFLEAKGYKEVKKDLIIKLPKYSLFELENGRKRMLASAGELQKGNELALPSKYVNFLYLASHYEKLKGSPEDNEQKQLFVEQHKHYLDEIIEQISEFSKRVILADANLDKVLSAYNKHRDKPIREQAENIIHLFTLTNLGAPAAFKYFDTTIDRKRYTSTKEVLDATLIHQSITGLYETRIDLSQLGGDGGEAAAKPAPGGSGGMNPLQLLQPLPAEIKGTKLLAHWNSGATITCIPESFLEDEQPIKKTLIKTIHGEKQQNVYYVTFKVKGRKVEAEVIASPYEYILLSPTDVPWLTQQPLQLTILVPLQEYQEKILSKTALPEDQKQQLKTLFVKYDNLWQHWENQVGHRKIRPHNIATGDYPPRPQKQYPINPKAKPSIQIVIDDLLKQGVLTPQNSTMNTPVYPVPKPDGRWRMVLDYREVNKTIPLTAAQNQHSAGILATIVRQKYKTTLDLANGFWAHPITPESYWLTAFTWQGKQYCWTRLPQGFLNSPALFNADVVDLLKEIPNVQVYVDDIYLSHDDPKEHVQQLEKVFQILLQAGYVVSLKKSEIGQKTVEFLGFNITKEGRGLTDTFKTKLLNITPPKDLKQLQSILGLLNFARNFIPNFAELVQPLYNLIAPAKGKYIEWSEENTKQLNMVIEALNTASNLEERLPEQRLVIKVNTSPSAGYVRYYNETGKKPIMYLNYVFSKAELKFSMLEKLLTTMHKALIKAMDLAMGQEILVYSPIVSMTKIQKTPLPERKALPIRWITWMTYLEDPRIQFHYDKTLPELKHIPDVYTSSQSPVKHPSQYEGVFYTDGSAIKSPDPTKSNNAGMGIVHATYKPEYQVLNQWSIPLGNHTAQMAEIAAVEFACKKALKIPGPVLVITDSFYVAESANKELPYWKSNGFVNNKKKPLKHISKWKSIAECLSMKPDITIQHEKGISLQIPVFILKGNALADKLATQGSYVVNAGKRTADGSEFEKRTADGSEFESPKKKAKVE

SEQ ID NO: 7230 - protein, 2094 aa, synthetic construct
MPAAKRVKLDGGDKKYSIGLDIGTNSVGWAVITDEYKVPSKKFKVLGNTDRHSIKKNLIGALLFDSGETAEATRLKRTARRRYTRRKNRICYLQEIFSNEMAKVDDSFFHRLEESFLVEEDKKHERHPIFGNIVDEVAYHEKYPTIYHLRKKLVDSTDKADLRLIYLALAHMIKFRGHFLIEGDLNPDNSDVDKLFIQLVQTYNQLFEENPINASGVDAKAILSARLSKSRRLENLIAQLPGEKKNGLFGNLIALSLGLTPNFKSNFDLAEDAKLQLSKDTYDDDLDNLLAQIGDQYADLFLAAKNLSDAILLSDILRVNTEITKAPLSASMIKRYDEHHQDLTLLKALVRQQLPEKYKEIFFDQSKNGYAGYIDGGASQEEFYKFIKPILEKMDGTEELLVKLNREDLLRKQRTFDNGSIPHQIHLGELHAILRRQEDFYPFLKDNREKIEKILTFRIPYYVGPLARGNSRFAWMTRKSEETITPWNFEEVVDKGASAQSFIERMTNFDKNLPNEKVLPKHSLLYEYFTVYNELTKVKYVTEGMRKPAFLSGEQKKAIVDLLFKTNRKVTVKQLKEDYFKKIECFDSVEISGVEDRFNASLGTYHDLLKIIKDKDFLDNEENEDILEDIVLTLTLFEDREMIEERLKTYAHLFDDKVMKQLKRRRYTGWGRLSRKLINGIRDKQSGKTILDFLKSDGFANRNFMQLIHDDSLTFKEDIQKAQVSGQGDSLHEHIANLAGSPAIKKGILQTVKVVDELVKVMGRHKPENIVIEMARENQTTQKGQKNSRERMKRIEEGIKELGSQILKEHPVENTQLQNEKLYLYYLQNGRDMYVDQELDINRLSDYDVDHIVPQSFLKDDSIDNKVLTRSDKARGKSDNVPSEEVVKKMKNYWRQLLNAKLITQRKFDNLTKAERGGLSELDKAGFIKRQLVETRQITKHVAQILDSRMNTKYDENDKLIREVKVITLKSKLVSDFRKDFQFYKVREINNYHHAHDAYLNAVVGTALIKKYPKLESEFVYGDYKVYDVRKMIAKSEQEIGKATAKYFFYSNIMNFFKTEITLANGEIRKRPLIETNGETGEIVWDKGRDFATVRKVLSMPQVNIVKKTEVQTGGFSKESILPKRNSDKLIARKKDWDPKKYGGFDSPTVAYSVLVVAKVEKGKSKKLKSVKELLGITIMERSSFEKNPIDFLEAKGYKEVKKDLIIKLPKYSLFELENGRKRMLASAGELQKGNELALPSKYVNFLYLASHYEKLKGSPEDNEQKQLFVEQHKHYLDEIIEQISEFSKRVILADANLDKVLSAYNKHRDKPIREQAENIIHLFTLTNLGAPAAFKYFDTTIDRKRYTSTKEVLDATLIHQSITGLYETRIDLSQLGGDGGEAAAKPAPGGSGGVLNLEEEYRLHEKPVPSSIDPSWLQLFPTVWAERAGMGLANQVPPVVVELRSGASPVAVRQYPMSKEAREGIRPHIQKFLDLGVLVPCRSPWNTPLLPVKKPGTNDYRPVQDLREINKRVQDIHPTVPNPYNLLSSLPPSYTWYSVLDLKDAFFCLRLHPNSQPLFAFEWKDPEKGNTGQLTWTRLPQGFKNSPTLFNEALHRDLAPFRALNPQVVLLQYVDDLLVAAPTYEDCKKGTQKLLQELSKLGYRVSAKKAQLCQREVTYLGYLLKEGKRWLTPARKATVMKIPVPTTPRQVREFLGTAGFCRLWIPGFASLAAPLYPLTKPSIPFIWTEEHQQAFDHIKKALLSAPALALPDLTKPFTLYIDERAGVARGVLTQTLGPWRRPVAYLSKKLDPVASGWPTCLKAVAAVALLLKDADKLTLGQNVTVIASHSLESIVRQPPDRWMTNARMTHYQSLLLNERVSFAPPAVLNPATLLPVESEATPVHRCSEILAEETGTRRDLEDQPLPGVPTWYTDGSSFITEGKRRAGAPIVDGKRTVWASSLPEGTSAQKAELVALTQALRLAEGKNINIYTDSRYAFATAHIHGAIYKQRGWLTSAGKDIKNKEEILALLEAIHLPRRVAIIHCPGHQRGSNPVATGNRRADEAAKQAALSTRVLAGTTKPAGKRTADGSEFEKRTADGSEFESPKKKAKVE

SEQ ID NO: 7231 - protein, 2127 aa, synthetic construct
MPAAKRVKLDGGDKKYSIGLDIGTNSVGWAVITDEYKVPSKKFKVLGNTDRHSIKKNLIGALLFDSGETAEATRLKRTARRRYTRRKNRICYLQEIFSNEMAKVDDSFFHRLEESFLVEEDKKHERHPIFGNIVDEVAYHEKYPTIYHLRKKLVDSTDKADLRLIYLALAHMIKFRGHFLIEGDLNPDNSDVDKLFIQLVQTYNQLFEENPINASGVDAKAILSARLSKSRRLENLIAQLPGEKKNGLFGNLIALSLGLTPNFKSNFDLAEDAKLQLSKDTYDDDLDNLLAQIGDQYADLFLAAKNLSDAILLSDILRVNTEITKAPLSASMIKRYDEHHQDLTLLKALVRQQLPEKYKEIFFDQSKNGYAGYIDGGASQEEFYKFIKPILEKMDGTEELLVKLNREDLLRKQRTFDNGSIPHQIHLGELHAILRRQEDFYPFLKDNREKIEKILTFRIPYYVGPLARGNSRFAWMTRKSEETITPWNFEEVVDKGASAQSFIERMTNFDKNLPNEKVLPKHSLLYEYFTVYNELTKVKYVTEGMRKPAFLSGEQKKAIVDLLFKTNRKVTVKQLKEDYFKKIECFDSVEISGVEDRFNASLGTYHDLLKIIKDKDFLDNEENEDILEDIVLTLTLFEDREMIEERLKTYAHLFDDKVMKQLKRRRYTGWGRLSRKLINGIRDKQSGKTILDFLKSDGFANRNFMQLIHDDSLTFKEDIQKAQVSGQGDSLHEHIANLAGSPAIKKGILQTVKVVDELVKVMGRHKPENIVIEMARENQTTQKGQKNSRERMKRIEEGIKELGSQILKEHPVENTQLQNEKLYLYYLQNGRDMYVDQELDINRLSDYDVDHIVPQSFLKDDSIDNKVLTRSDKARGKSDNVPSEEVVKKMKNYWRQLLNAKLITQRKFDNLTKAERGGLSELDKAGFIKRQLVETRQITKHVAQILDSRMNTKYDENDKLIREVKVITLKSKLVSDFRKDFQFYKVREINNYHHAHDAYLNAVVGTALIKKYPKLESEFVYGDYKVYDVRKMIAKSEQEIGKATAKYFFYSNIMNFFKTEITLANGEIRKRPLIETNGETGEIVWDKGRDFATVRKVLSMPQVNIVKKTEVQTGGFSKESILPKRNSDKLIARKKDWDPKKYGGFDSPTVAYSVLVVAKVEKGKSKKLKSVKELLGITIMERSSFEKNPIDFLEAKGYKEVKKDLIIKLPKYSLFELENGRKRMLASAGELQKGNELALPSKYVNFLYLASHYEKLKGSPEDNEQKQLFVEQHKHYLDEIIEQISEFSKRVILADANLDKVLSAYNKHRDKPIREQAENIIHLFTLTNLGAPAAFKYFDTTIDRKRYTSTKEVLDATLIHQSITGLYETRIDLSQLGGDGGEAAAKPAPGGSGGLLGRDLLTKLKAQIQFSTEGPQVTWEDRPAMCLVLNLEEEYRLHEKPVPPSIDPSWLQLFPMVWAEKAGMGLANQVPPVVVELKSDASPVAVRQYPMSKEAREGIRPHIQRFLDLGILVPCQSPWNTPLLPVKKPGTNDYRPVQDLREVNKRVQDIHPTVPNPYNLLSSLPPSHTWYSVLDLKDAFFCLKLHPNSQPLFAFEWRDPEKGNTGQLTWTRLPQGFKNSPTLFNEALHRDLASFRALNPQVVMLQYVDDLLVAAPTYRDCKEGTRRLLQELSKLGYRVSAKKAQLCREEVTYLGYLLKGGKRWLTPARKATVMKIPTPTTPRQVREFLGTAGFCRLWIPGFASLAAPLYPLTRPKVPFTWTEAHQEAFGRIKEALLSAPALALPDLTKPFALYVDEKEGVARGVLTQTLGPWRRPVAYLSKKLDPVASGWPTCLKAIAAVALLLKDADKLTLGQNVLVIAPHNLESIVRQPPDRWMTNARMTHYQSLLLNERVSFAPPAILNPATLLPVESDDTPIHICSEILAEETGTRPDLRDQPLPGVPAWYTDGSSFIMDGRRQAGAAIVDNKRTVWASNLPEGTSAQKAELIALTQALRLAEGKSINIYTDSRYAFATAHVHGAIYKQRGWLTSAGKDIKNKEEILALLEAIHLPKRVAIIHCPGHQRGTDPVATGNRKADEAAKQAAQSTRILTETTKNAGKRTADGSEFEKRTADGSEFESPKKKAKVE

SEQ ID NO: 7232 - protein, 2218 aa, synthetic construct
MPAAKRVKLDGGDKKYSIGLDIGTNSVGWAVITDEYKVPSKKFKVLGNTDRHSIKKNLIGALLFDSGETAEATRLKRTARRRYTRRKNRICYLQEIFSNEMAKVDDSFFHRLEESFLVEEDKKHERHPIFGNIVDEVAYHEKYPTIYHLRKKLVDSTDKADLRLIYLALAHMIKFRGHFLIEGDLNPDNSDVDKLFIQLVQTYNQLFEENPINASGVDAKAILSARLSKSRRLENLIAQLPGEKKNGLFGNLIALSLGLTPNFKSNFDLAEDAKLQLSKDTYDDDLDNLLAQIGDQYADLFLAAKNLSDAILLSDILRVNTEITKAPLSASMIKRYDEHHQDLTLLKALVRQQLPEKYKEIFFDQSKNGYAGYIDGGASQEEFYKFIKPILEKMDGTEELLVKLNREDLLRKQRTFDNGSIPHQIHLGELHAILRRQEDFYPFLKDNREKIEKILTFRIPYYVGPLARGNSRFAWMTRKSEETITPWNFEEVVDKGASAQSFIERMTNFDKNLPNEKVLPKHSLLYEYFTVYNELTKVKYVTEGMRKPAFLSGEQKKAIVDLLFKTNRKVTVKQLKEDYFKKIECFDSVEISGVEDRFNASLGTYHDLLKIIKDKDFLDNEENEDILEDIVLTLTLFEDREMIEERLKTYAHLFDDKVMKQLKRRRYTGWGRLSRKLINGIRDKQSGKTILDFLKSDGFANRNFMQLIHDDSLTFKEDIQKAQVSGQGDSLHEHIANLAGSPAIKKGILQTVKVVDELVKVMGRHKPENIVIEMARENQTTQKGQKNSRERMKRIEEGIKELGSQILKEHPVENTQLQNEKLYLYYLQNGRDMYVDQELDINRLSDYDVDHIVPQSFLKDDSIDNKVLTRSDKARGKSDNVPSEEVVKKMKNYWRQLLNAKLITQRKFDNLTKAERGGLSELDKAGFIKRQLVETRQITKHVAQILDSRMNTKYDENDKLIREVKVITLKSKLVSDFRKDFQFYKVREINNYHHAHDAYLNAVVGTALIKKYPKLESEFVYGDYKVYDVRKMIAKSEQEIGKATAKYFFYSNIMNFFKTEITLANGEIRKRPLIETNGETGEIVWDKGRDFATVRKVLSMPQVNIVKKTEVQTGGFSKESILPKRNSDKLIARKKDWDPKKYGGFDSPTVAYSVLVVAKVEKGKSKKLKSVKELLGITIMERSSFEKNPIDFLEAKGYKEVKKDLIIKLPKYSLFELENGRKRMLASAGELQKGNELALPSKYVNFLYLASHYEKLKGSPEDNEQKQLFVEQHKHYLDEIIEQISEFSKRVILADANLDKVLSAYNKHRDKPIREQAENIIHLFTLTNLGAPAAFKYFDTTIDRKRYTSTKEVLDATLIHQSITGLYETRIDLSQLGGDGGEAAAKPAPGGSGGTLGDQGSRGSDPLPEPRVTLTVEGIPTEFLVNTGAEHSVLTKPMGKMGSKRTVVAGATGSKVYPWTTKRLLKIGQKQVTHSFLVIPECPAPLLGRDLLTKLKAQIQFSTEGPQVTWEDRPAMCLVLNLEEEYRLHEKPVPPSIDPSWLQLFPMVWAEKAGMGLANQVPPVVVELKSDASPVAVRQYPMSKEAREGIRPHIQRFLDLGILVPCQSPWNTPLLPVKKPGTNDYRPVQDLREVNKRVQDIHPTVPNPYNLLSSLPPSHTWYSVLDLKDAFFCLKLHPNSQPLFAFEWRDPEKGNTGQLTWTRLPQGFKNSPTLFNEALHRDLASFRALNPQVVMLQYVDDLLVAAPTYRDCKEGTRRLLQELSKLGYRVSAKKAQLCREEVTYLGYLLKGGKRWLTPARKATVMKIPTPTTPRQVREFLGTAGFCRLWIPGFASLAAPLYPLTRPKVPFTWTEAHQEAFGRIKEALLSAPALALPDLTKPFALYVDEKEGVARGVLTQTLGPWRRPVAYLSKKLDPVASGWPTCLKAIAAVALLLKDADKLTLGQNVLVIAPHNLESIVRQPPDRWMTNARMTHYQSLLLNERVSFAPPAILNPATLLPVESDDTPIHICSEILAEETGTRPDLRDQPLPGVPAWYTDGSSFIMDGRRQAGAAIVDNKRTVWASNLPEGTSAQKAELIALTQALRLAEGKSINIYTDSRYAFATAHVHGAIYKQRGWLTSAGKDIKNKEEILALLEAIHLPKRVAIIHCPGHQRGTDPVATGNRKADEAAKQAAQSTRILTETTKNAGKRTADGSEFEKRTADGSEFESPKKKAKVE

SEQ ID NO: 7233 - protein, 2096 aa, synthetic construct
MPAAKRVKLDGGDKKYSIGLDIGTNSVGWAVITDEYKVPSKKFKVLGNTDRHSIKKNLIGALLFDSGETAEATRLKRTARRRYTRRKNRICYLQEIFSNEMAKVDDSFFHRLEESFLVEEDKKHERHPIFGNIVDEVAYHEKYPTIYHLRKKLVDSTDKADLRLIYLALAHMIKFRGHFLIEGDLNPDNSDVDKLFIQLVQTYNQLFEENPINASGVDAKAILSARLSKSRRLENLIAQLPGEKKNGLFGNLIALSLGLTPNFKSNFDLAEDAKLQLSKDTYDDDLDNLLAQIGDQYADLFLAAKNLSDAILLSDILRVNTEITKAPLSASMIKRYDEHHQDLTLLKALVRQQLPEKYKEIFFDQSKNGYAGYIDGGASQEEFYKFIKPILEKMDGTEELLVKLNREDLLRKQRTFDNGSIPHQIHLGELHAILRRQEDFYPFLKDNREKIEKILTFRIPYYVGPLARGNSRFAWMTRKSEETITPWNFEEVVDKGASAQSFIERMTNFDKNLPNEKVLPKHSLLYEYFTVYNELTKVKYVTEGMRKPAFLSGEQKKAIVDLLFKTNRKVTVKQLKEDYFKKIECFDSVEISGVEDRFNASLGTYHDLLKIIKDKDFLDNEENEDILEDIVLTLTLFEDREMIEERLKTYAHLFDDKVMKQLKRRRYTGWGRLSRKLINGIRDKQSGKTILDFLKSDGFANRNFMQLIHDDSLTFKEDIQKAQVSGQGDSLHEHIANLAGSPAIKKGILQTVKVVDELVKVMGRHKPENIVIEMARENQTTQKGQKNSRERMKRIEEGIKELGSQILKEHPVENTQLQNEKLYLYYLQNGRDMYVDQELDINRLSDYDVDHIVPQSFLKDDSIDNKVLTRSDKARGKSDNVPSEEVVKKMKNYWRQLLNAKLITQRKFDNLTKAERGGLSELDKAGFIKRQLVETRQITKHVAQILDSRMNTKYDENDKLIREVKVITLKSKLVSDFRKDFQFYKVREINNYHHAHDAYLNAVVGTALIKKYPKLESEFVYGDYKVYDVRKMIAKSEQEIGKATAKYFFYSNIMNFFKTEITLANGEIRKRPLIETNGETGEIVWDKGRDFATVRKVLSMPQVNIVKKTEVQTGGFSKESILPKRNSDKLIARKKDWDPKKYGGFDSPTVAYSVLVVAKVEKGKSKKLKSVKELLGITIMERSSFEKNPIDFLEAKGYKEVKKDLIIKLPKYSLFELENGRKRMLASAGELQKGNELALPSKYVNFLYLASHYEKLKGSPEDNEQKQLFVEQHKHYLDEIIEQISEFSKRVILADANLDKVLSAYNKHRDKPIREQAENIIHLFTLTNLGAPAAFKYFDTTIDRKRYTSTKEVLDATLIHQSITGLYETRIDLSQLGGDGGEAAAKPAPGGSGGTLGIEDEYRLHETSTEPDVSLGSTWLSDFPQAWAETGGMGLAVRQAPLIIPLKATSTPVSIQQYPMSHEARLGIKPHIQRLLDQGILVPCQSPWNTPLLPVKKPGTNDYRPVQDLREVNKRVEDIHPTVPNPYNLLSGLPPSHQWYTVLDLKDAFFCLRLHPTSQPLFAFEWRDPGMGISGQLTWTRLPQGFKNSPTLFNEALHRDLADFRIQHPDLILLQYVDDILLAATSELDCQQGTRALLQTLGDLGYRASAKKAQICQKQVKYLGYLLREGQRWLTEARKETVMGQPVPKTPRQLREFLGTAGFCRLWIPGFAEMAAPLYPLTKPGTLFSWGPDQQKAYQEIKQALLTAPALGLPDLTKPFELFVDEKQGYAKGVLTQKLGPWRRPVAYLSKKLDPVAAGWPPCLRMVAAIAVLTKDAGKLTMGQPLVILAPHAVEALVKQPPDRWLSNARMTHYQAMLLDTDRVQFGPVVALNPATLLPLPEEGAPHDCLEILAETHGTRPDLTDQPIPDADHTWYTDGSSFLQEGQRKAGAAVTTETEVIWAGALPAGTSAQRAELIALTQALKMAEGKRLNVYTDSRYAFATAHIHGEIYRRRGWLTSEGREIKNKSEILALLKALFLPKRLSIIHCLGHQKGDSAEARGNRLADQAAREAAIKTPPDTSTLLAGKRTADGSEFEKRTADGSEFESPKKKAKVE

SEQ ID NO: 7234 - protein, 2096 aa, synthetic construct
MPAAKRVKLDGGDKKYSIGLDIGTNSVGWAVITDEYKVPSKKFKVLGNTDRHSIKKNLIGALLFDSGETAEATRLKRTARRRYTRRKNRICYLQEIFSNEMAKVDDSFFHRLEESFLVEEDKKHERHPIFGNIVDEVAYHEKYPTIYHLRKKLVDSTDKADLRLIYLALAHMIKFRGHFLIEGDLNPDNSDVDKLFIQLVQTYNQLFEENPINASGVDAKAILSARLSKSRRLENLIAQLPGEKKNGLFGNLIALSLGLTPNFKSNFDLAEDAKLQLSKDTYDDDLDNLLAQIGDQYADLFLAAKNLSDAILLSDILRVNTEITKAPLSASMIKRYDEHHQDLTLLKALVRQQLPEKYKEIFFDQSKNGYAGYIDGGASQEEFYKFIKPILEKMDGTEELLVKLNREDLLRKQRTFDNGSIPHQIHLGELHAILRRQEDFYPFLKDNREKIEKILTFRIPYYVGPLARGNSRFAWMTRKSEETITPWNFEEVVDKGASAQSFIERMTNFDKNLPNEKVLPKHSLLYEYFTVYNELTKVKYVTEGMRKPAFLSGEQKKAIVDLLFKTNRKVTVKQLKEDYFKKIECFDSVEISGVEDRFNASLGTYHDLLKIIKDKDFLDNEENEDILEDIVLTLTLFEDREMIEERLKTYAHLFDDKVMKQLKRRRYTGWGRLSRKLINGIRDKQSGKTILDFLKSDGFANRNFMQLIHDDSLTFKEDIQKAQVSGQGDSLHEHIANLAGSPAIKKGILQTVKVVDELVKVMGRHKPENIVIEMARENQTTQKGQKNSRERMKRIEEGIKELGSQILKEHPVENTQLQNEKLYLYYLQNGRDMYVDQELDINRLSDYDVDHIVPQSFLKDDSIDNKVLTRSDKARGKSDNVPSEEVVKKMKNYWRQLLNAKLITQRKFDNLTKAERGGLSELDKAGFIKRQLVETRQITKHVAQILDSRMNTKYDENDKLIREVKVITLKSKLVSDFRKDFQFYKVREINNYHHAHDAYLNAVVGTALIKKYPKLESEFVYGDYKVYDVRKMIAKSEQEIGKATAKYFFYSNIMNFFKTEITLANGEIRKRPLIETNGETGEIVWDKGRDFATVRKVLSMPQVNIVKKTEVQTGGFSKESILPKRNSDKLIARKKDWDPKKYGGFDSPTVAYSVLVVAKVEKGKSKKLKSVKELLGITIMERSSFEKNPIDFLEAKGYKEVKKDLIIKLPKYSLFELENGRKRMLASAGELQKGNELALPSKYVNFLYLASHYEKLKGSPEDNEQKQLFVEQHKHYLDEIIEQISEFSKRVILADANLDKVLSAYNKHRDKPIREQAENIIHLFTLTNLGAPAAFKYFDTTIDRKRYTSTKEVLDATLIHQSITGLYETRIDLSQLGGDGGEAAAKPAPGGSGGTLGIEDEYRLHETSTEPDVSLGSTWLSDFPQAWAETGGMGLAVRQAPLIIPLKATSTPVSIQQYPMSHEARLGIKPHIQRLLDQGILVPCQSPWNTPLLPVKKPGTNDYRPVQDLREVNKRVEDIHPTVPNPYNLLSGLPPSHQWYTVLDLKDAFFCLRLHPTSQPLFAFEWRDPGMGISGQLTWTRLPQGFKNSPTLFDEALHRDLADFRIQHPDLILLQYVDDILLAATSELDCQQGTRALLQTLGDLGYRASAKKAQICQKQVKYLGYLLREGQRWLTEARKETVMGQPVPKTPRQLREFLGTAGFCRLWIPGFAEMAAPLYPLTKTGTLFSWGPDQQKAYQEIKQALLTAPALGLPDLTKPFELFVDEKQGYAKGVLTQKLGPWRRPVAYLSKKLDPVAAGWPPCLRMVAAIAVLTKDAGKLTMGQPLVILAPHAVEALVKQPPDRWLSNARMTHYQAMLLDTDRVQFGPVVALNPATLLPLPEEGAPHDCLEILAETHGTRPDLTDQPIPDADHTWYTDGSSFLQEGQRKAGAAVTTETEVIWAGALPAGTSAQRAELIALTQALKMAEGKRLNVYTDSRYAFATAHIHGEIYRRRGLLTSEGREIKNKSEILALLKALFLPKRLSIIHCLGHQKGDSAEARGNRLADQAAREAAIKTPPDTSTLLAGKRTADGSEFEKRTADGSEFESPKKKAKVE

SEQ ID NO: 7235 - protein, 2096 aa, synthetic construct; identical to SEQ ID NO: 7233

SEQ ID NO: 7236 - protein, 2096 aa, synthetic construct
MPAAKRVKLDGGDKKYSIGLDIGTNSVGWAVITDEYKVPSKKFKVLGNTDRHSIKKNLIGALLFDSGETAEATRLKRTARRRYTRRKNRICYLQEIFSNEMAKVDDSFFHRLEESFLVEEDKKHERHPIFGNIVDEVAYHEKYPTIYHLRKKLVDSTDKADLRLIYLALAHMIKFRGHFLIEGDLNPDNSDVDKLFIQLVQTYNQLFEENPINASGVDAKAILSARLSKSRRLENLIAQLPGEKKNGLFGNLIALSLGLTPNFKSNFDLAEDAKLQLSKDTYDDDLDNLLAQIGDQYADLFLAAKNLSDAILLSDILRVNTEITKAPLSASMIKRYDEHHQDLTLLKALVRQQLPEKYKEIFFDQSKNGYAGYIDGGASQEEFYKFIKPILEKMDGTEELLVKLNREDLLRKQRTFDNGSIPHQIHLGELHAILRRQEDFYPFLKDNREKIEKILTFRIPYYVGPLARGNSRFAWMTRKSEETITPWNFEEVVDKGASAQSFIERMTNFDKNLPNEKVLPKHSLLYEYFTVYNELTKVKYVTEGMRKPAFLSGEQKKAIVDLLFKTNRKVTVKQLKEDYFKKIECFDSVEISGVEDRFNASLGTYHDLLKIIKDKDFLDNEENEDILEDIVLTLTLFEDREMIEERLKTYAHLFDDKVMKQLKRRRYTGWGRLSRKLINGIRDKQSGKTILDFLKSDGFANRNFMQLIHDDSLTFKEDIQKAQVSGQGDSLHEHIANLAGSPAIKKGILQTVKVVDELVKVMGRHKPENIVIEMARENQTTQKGQKNSRERMKRIEEGIKELGSQILKEHPVENTQLQNEKLYLYYLQNGRDMYVDQELDINRLSDYDVDHIVPQSFLKDDSIDNKVLTRSDKARGKSDNVPSEEVVKKMKNYWRQLLNAKLITQRKFDNLTKAERGGLSELDKAGFIKRQLVETRQITKHVAQILDSRMNTKYDENDKLIREVKVITLKSKLVSDFRKDFQFYKVREINNYHHAHDAYLNAVVGTALIKKYPKLESEFVYGDYKVYDVRKMIAKSEQEIGKATAKYFFYSNIMNFFKTEITLANGEIRKRPLIETNGETGEIVWDKGRDFATVRKVLSMPQVNIVKKTEVQTGGFSKESILPKRNSDKLIARKKDWDPKKYGGFDSPTVAYSVLVVAKVEKGKSKKLKSVKELLGITIMERSSFEKNPIDFLEAKGYKEVKKDLIIKLPKYSLFELENGRKRMLASAGELQKGNELALPSKYVNFLYLASHYEKLKGSPEDNEQKQLFVEQHKHYLDEIIEQISEFSKRVILADANLDKVLSAYNKHRDKPIREQAENIIHLFTLTNLGAPAAFKYFDTTIDRKRYTSTKEVLDATLIHQSITGLYETRIDLSQLGGDGGEAAAKPAPGGSGGTLNIEDEYRLHEISTEPDVSPGSTWLSDFPQAWAETGGMGLAVRQAPLIIPLKATSTPVSIKQYPMSQEAKLGIKPHIQRLLDQGILVPCQSPWNTPLLPVKKPGTNDYRPVQGLREVNKRVEDIHPTVPNPYNLLSGLPTSHRWYTVLDLKDAFFCLRLHPTSQPLFASEWRDPGMGISGQLTWTRLPQGFKNSPTLFNEALHRGLADFRIQHPDLILLQYVDDLLLAATSELDCQQGTRALLKTLGNLGYRASAKKAQICQKQVKYLGYLLREGQRWLTEARKETVMGQPTPKTPRQLREFLGKAGFCRLFIPRFAEMAAPLYPLTKPGTLFNWGPDQQKAYHEIKQALLTAPALGLPDLTKPFELFVDEKQGYAKGVLTQKLGPWRRPVAYLSKKLDPVAAGWPPCLRMVAAIAVLTKDAGKLTMGQPLVILAPHAVEALVKQPPDRWLSNARMTHYQAMLLDTDRVQFGPVVALNPATLLPLPEEGAPHDCLEILAETHGTEPDLTDQPIPDADHTWYTDGSSFLQEGQRKAGAAVTTETEVIWARALPAGTSAQRAELIALTQALKMAEGKRLNVYTDSRYAFATAHIHGEIYKRRGWLTSEGREIKNKSEILALLKALFLPKRLSIIHCLGHQKGDSAEARGNRLADQAAREAAIKTPPDTSTLLAGKRTADGSEFEKRTADGSEFESPKKKAKVE

SEQ ID NO: 7237 - protein, 2116 aa, synthetic construct
MPAAKRVKLDGGDKKYSIGLDIGTNSVGWAVITDEYKVPSKKFKVLGNTDRHSIKKNLIGALLFDSGETAEATRLKRTARRRYTRRKNRICYLQEIFSNEMAKVDDSFFHRLEESFLVEEDKKHERHPIFGNIVDEVAYHEKYPTIYHLRKKLVDSTDKADLRLIYLALAHMIKFRGHFLIEGDLNPDNSDVDKLFIQLVQTYNQLFEENPINASGVDAKAILSARLSKSRRLENLIAQLPGEKKNGLFGNLIALSLGLTPNFKSNFDLAEDAKLQLSKDTYDDDLDNLLAQIGDQYADLFLAAKNLSDAILLSDILRVNTEITKAPLSASMIKRYDEHHQDLTLLKALVRQQLPEKYKEIFFDQSKNGYAGYIDGGASQEEFYKFIKPILEKMDGTEELLVKLNREDLLRKQRTFDNGSIPHQIHLGELHAILRRQEDFYPFLKDNREKIEKILTFRIPYYVGPLARGNSRFAWMTRKSEETITPWNFEEVVDKGASAQSFIERMTNFDKNLPNEKVLPKHSLLYEYFTVYNELTKVKYVTEGMRKPAFLSGEQKKAIVDLLFKTNRKVTVKQLKEDYFKKIECFDSVEISGVEDRFNASLGTYHDLLKIIKDKDFLDNEENEDILEDIVLTLTLFEDREMIEERLKTYAHLFDDKVMKQLKRRRYTGWGRLSRKLINGIRDKQSGKTILDFLKSDGFANRNFMQLIHDDSLTFKEDIQKAQVSGQGDSLHEHIANLAGSPAIKKGILQTVKVVDELVKVMGRHKPENIVIEMARENQTTQKGQKNSRERMKRIEEGIKELGSQILKEHPVENTQLQNEKLYLYYLQNGRDMYVDQELDINRLSDYDVDHIVPQSFLKDDSIDNKVLTRSDKARGKSDNVPSEEVVKKMKNYWRQLLNAKLITQRKFDNLTKAERGGLSELDKAGFIKRQLVETRQITKHVAQILDSRMNTKYDENDKLIREVKVITLKSKLVSDFRKDFQFYKVREINNYHHAHDAYLNAVVGTALIKKYPKLESEFVYGDYKVYDVRKMIAKSEQEIGKATAKYFFYSNIMNFFKTEITLANGEIRKRPLIETNGETGEIVWDKGRDFATVRKVLSMPQVNIVKKTEVQTGGFSKESILPKRNSDKLIARKKDWDPKKYGGFDSPTVAYSVLVVAKVEKGKSKKLKSVKELLGITIMERSSFEKNPIDFLEAKGYKEVKKDLIIKLPKYSLFELENGRKRMLASAGELQKGNELALPSKYVNFLYLASHYEKLKGSPEDNEQKQLFVEQHKHYLDEIIEQISEFSKRVILADANLDKVLSAYNKHRDKPIREQAENIIHLFTLTNLGAPAAFKYFDTTIDRKRYTSTKEVLDATLIHQSITGLYETRIDLSQLGGDGGEAAAKPAPGGSGGVQEISDSRPMLHIYLNGRRFLGLLDTGADKTCIAGRDWPANWPIHQTESSLQGLGMACGVARSSQPLRWQHEDKSGIIHPFVIPTLPFTLWGRDIMKDIKVRLMTDSPDDSQDLMIGAIESNLFADQISWKSDQPVWLNQWPLKQEKLQALQQLVTEQLQLGHLEESNSPWNTPVFVIKKKSGKWRLLQDLRAVNATMHDMGALQPGLPSPVAVPKGWEIIIIDLQDCFFNIKLHPEDCKRFAFSVPSPNFKRPYQRFQWKVLPQGMKNSPTLCQKFVDKAILTVRDKYQDSYIVHYMDDILLAHPSRSIVDEILTSMIQALNKHGLVVSTEKIQKYDNLKYLGTHIQGDSVSYQKLQIRTDKLRTLNDFQKLLGNINWIRPFLKLTTGELKPLFEILNGDSNPISTRKLTPEACKALQLMNERLSTARVKRLDLSQPWSLCILKTEYTPTACLWQDGVVEWIHLPHISPKVITPYDIFCTQLIIKGRHRSKELFSKDPDYIVVPYTKVQFDLLLQEKEDWPISLLGFLGEVHFHLPKDPLLTFTLQTAIIFPHMTSTTPLEKGIVIFTDGSANGRSVTYIQGREPIIKENTQNTAQQAEIVAVITAFEEVSQPFNLYTDSKYVTGLFPEIETATLSPRTKIYTELKHLQRLIHKRQEKFYIGHIRGHTGLPGPLAQGNAYADSLTRILTAAGKRTADGSEFEKRTADGSEFESPKKKAKVE

SEQ ID NO: 7238 - protein, 2087 aa, synthetic construct
MPAAKRVKLDGGDKKYSIGLDIGTNSVGWAVITDEYKVPSKKFKVLGNTDRHSIKKNLIGALLFDSGETAEATRLKRTARRRYTRRKNRICYLQEIFSNEMAKVDDSFFHRLEESFLVEEDKKHERHPIFGNIVDEVAYHEKYPTIYHLRKKLVDSTDKADLRLIYLALAHMIKFRGHFLIEGDLNPDNSDVDKLFIQLVQTYNQLFEENPINASGVDAKAILSARLSKSRRLENLIAQLPGEKKNGLFGNLIALSLGLTPNFKSNFDLAEDAKLQLSKDTYDDDLDNLLAQIGDQYADLFLAAKNLSDAILLSDILRVNTEITKAPLSASMIKRYDEHHQDLTLLKALVRQQLPEKYKEIFFDQSKNGYAGYIDGGASQEEFYKFIKPILEKMDGTEELLVKLNREDLLRKQRTFDNGSIPHQIHLGELHAILRRQEDFYPFLKDNREKIEKILTFRIPYYVGPLARGNSRFAWMTRKSEETITPWNFEEVVDKGASAQSFIERMTNFDKNLPNEKVLPKHSLLYEYFTVYNELTKVKYVTEGMRKPAFLSGEQKKAIVDLLFKTNRKVTVKQLKEDYFKKIECFDSVEISGVEDRFNASLGTYHDLLKIIKDKDFLDNEENEDILEDIVLTLTLFEDREMIEERLKTYAHLFDDKVMKQLKRRRYTGWGRLSRKLINGIRDKQSGKTILDFLKSDGFANRNFMQLIHDDSLTFKEDIQKAQVSGQGDSLHEHIANLAGSPAIKKGILQTVKVVDELVKVMGRHKPENIVIEMARENQTTQKGQKNSRERMKRIEEGIKELGSQILKEHPVENTQLQNEKLYLYYLQNGRDMYVDQELDINRLSDYDVDHIVPQSFLKDDSIDNKVLTRSDKARGKSDNVPSEEVVKKMKNYWRQLLNAKLITQRKFDNLTKAERGGLSELDKAGFIKRQLVETRQITKHVAQILDSRMNTKYDENDKLIREVKVITLKSKLVSDFRKDFQFYKVREINNYHHAHDAYLNAVVGTALIKKYPKLESEFVYGDYKVYDVRKMIAKSEQEIGKATAKYFFYSNIMNFFKTEITLANGEIRKRPLIETNGETGEIVWDKGRDFATVRKVLSMPQVNIVKKTEVQTGGFSKESILPKRNSDKLIARKKDWDPKKYGGFDSPTVAYSVLVVAKVEKGKSKKLKSVKELLGITIMERSSFEKNPIDFLEAKGYKEVKKDLIIKLPKYSLFELENGRKRMLASAGELQKGNELALPSKYVNFLYLASHYEKLKGSPEDNEQKQLFVEQHKHYLDEIIEQISEFSKRVILADANLDKVLSAYNKHRDKPIREQAENIIHLFTLTNLGAPAAFKYFDTTIDRKRYTSTKEVLDATLIHQSITGLYETRIDLSQLGGDGGEAAAKPAPGGSGGIPWLMKKPLQLTTLVPLQEYEERLLKQTMLTGSYKEKLQSLFLKYDALWQHWENQVGHRRIKPHHIATGTVNPRPQKQYPINPKAKASIQTVINDLLKQGVLIQQNSIMNTPVYPVPKPDGKWRMVLDYREVNKTIPLIAAQNQHSAGILSSIFRGKYKTTLDLSNGFWAHSITPESYWLTAFTWLGQQYCWTRLPQGFLNSPALFNADVVDLLKEVPNVQVYVDDIYISHDDPREHLEQLEKVFSLLLNAGYVVSLKKSEIAQHEVEFLGFNITKEGRGLTETFKQKLLNITPPRDLKQLQSILGKLNFARNFIPNFSELVKPLYNIIATAPGKYITWTTDNSQQLQNIISMLNSAENLEERNPEVRLIMKVNTSPSAGYIRFYNEFAKRPIMYLNYVYTKAEVKFTNTEKLLTTIHKGLIKALDLGMGQEILVYSPIVSMTKIQKTPLPERKALPIRWITWMSYLEDPRIQFHYDKTLPELQQVPTVTDDIIAKIKHPSEFSMVFYTDGSAIKHPNVNKSHNAGMGIAQVQFKPEFTVINTWSIPLGDHTAQLAEVAAVEFACKKALKIDGPVLIVTDSFYVAESVNKELPYWQSNGFFNNKKKPLKHVSKWKSIADCIQLKPDIIIIHEKGHQPTASTFHTEGNNLADKLATQGSYVVNAGKRTADGSEFEKRTADGSEFESPKKKAKVE

SEQ ID NO: 7239 - protein, 2176 aa, synthetic construct
MPAAKRVKLDGGDKKYSIGLDIGTNSVGWAVITDEYKVPSKKFKVLGNTDRHSIKKNLIGALLFDSGETAEATRLKRTARRRYTRRKNRICYLQEIFSNEMAKVDDSFFHRLEESFLVEEDKKHERHPIFGNIVDEVAYHEKYPTIYHLRKKLVDSTDKADLRLIYLALAHMIKFRGHFLIEGDLNPDNSDVDKLFIQLVQTYNQLFEENPINASGVDAKAILSARLSKSRRLENLIAQLPGEKKNGLFGNLIALSLGLTPNFKSNFDLAEDAKLQLSKDTYDDDLDNLLAQIGDQYADLFLAAKNLSDAILLSDILRVNTEITKAPLSASMIKRYDEHHQDLTLLKALVRQQLPEKYKEIFFDQSKNGYAGYIDGGASQEEFYKFIKPILEKMDGTEELLVKLNREDLLRKQRTFDNGSIPHQIHLGELHAILRRQEDFYPFLKDNREKIEKILTFRIPYYVGPLARGNSRFAWMTRKSEETITPWNFEEVVDKGASAQSFIERMTNFDKNLPNEKVLPKHSLLYEYFTVYNELTKVKYVTEGMRKPAFLSGEQKKAIVDLLFKTNRKVTVKQLKEDYFKKIECFDSVEISGVEDRFNASLGTYHDLLKIIKDKDFLDNEENEDILEDIVLTLTLFEDREMIEERLKTYAHLFDDKVMKQLKRRRYTGWGRLSRKLINGIRDKQSGKTILDFLKSDGFANRNFMQLIHDDSLTFKEDIQKAQVSGQGDSLHEHIANLAGSPAIKKGILQTVKVVDELVKVMGRHKPENIVIEMARENQTTQKGQKNSRERMKRIEEGIKELGSQILKEHPVENTQLQNEKLYLYYLQNGRDMYVDQELDINRLSDYDVDHIVPQSFLKDDSIDNKVLTRSDKARGKSDNVPSEEVVKKMKNYWRQLLNAKLITQRKFDNLTKAERGGLSELDKAGFIKRQLVETRQITKHVAQILDSRMNTKYDENDKLIREVKVITLKSKLVSDFRKDFQFYKVREINNYHHAHDAYLNAVVGTALIKKYPKLESEFVYGDYKVYDVRKMIAKSEQEIGKATAKYFFYSNIMNFFKTEITLANGEIRKRPLIETNGETGEIVWDKGRDFATVRKVLSMPQVNIVKKTEVQTGGFSKESILPKRNSDKLIARKKDWDPKKYGGFDSPTVAYSVLVVAKVEKGKSKKLKSVKELLGITIMERSSFEKNPIDFLEAKGYKEVKKDLIIKLPKYSLFELENGRKRMLASAGELQKGNELALPSKYVNFLYLASHYEKLKGSPEDNEQKQLFVEQHKHYLDEIIEQISEFSKRVILADANLDKVLSAYNKHRDKPIREQAENIIHLFTLTNLGAPAAFKYFDTTIDRKRYTSTKEVLDATLIHQSITGLYETRIDLSQLGGDGGEAAAKPAPGGSGGMDPLQLLQPLEAEIKGTKLKAHWNSGATITCVPQAFLEEEVPIKNIWIKTIHGEKEQPVYYLTFKIQGRKVEAEVISSPYDYILVSPSDIPWLMKKPLQLTTLVPLQEYEERLLKQTMLTGSYKEKLQSLFLKYDALWQHWENQVGHRRIKPHHIATGTVNPRPQKQYPINPKAKASIQTVINDLLKQGVLIQQNSIMNTPVYPVPKPDGKWRMVLDYREVNKTIPLIAAQNQHSAGILSSIFRGKYKTTLDLSNGFWAHSITPESYWLTAFTWLGQQYCWTRLPQGFLNSPALFNADVVDLLKEVPNVQVYVDDIYISHDDPREHLEQLEKVFSLLLNAGYVVSLKKSEIAQHEVEFLGFNITKEGRGLTETFKQKLLNITPPRDLKQLQSILGLLNFARNFIPNFSELVKPLYNIIATAPGKYITWTTDNSQQLQNIISMLNSAENLEERNPEVRLIMKVNTSPSAGYIRFYNEFAKRPIMYLNYVYTKAEVKFTNTEKLLTTIHKGLIKALDLGMGQEILVYSPIVSMTKIQKTPLPERKALPIRWITWMSYLEDPRIQFHYDKTLPELQQVPTVTDDIIAKIKHPSEFSMVFYTDGSAIKHPNVNKSHNAGMGIAQVQFKPEFTVINTWSIPLGDHTAQLAEVAAVEFACKKALKIDGPVLIVTDSFYVAESVNKELPYWQSNGFFNNKKKPLKHVSKWKSIADCIQLKPDIIIIHEKGHQPTASTFHTEGNNLADKLATQGSYVVNAGKRTADGSEFEKRTADGSEFESPKKKAKVE

SEQ ID NO: 7240 - protein, 2094 aa, synthetic construct
MPAAKRVKLDGGDKKYSIGLDIGTNSVGWAVITDEYKVPSKKFKVLGNTDRHSIKKNLIGALLFDSGETAEATRLKRTARRRYTRRKNRICYLQEIFSNEMAKVDDSFFHRLEESFLVEEDKKHERHPIFGNIVDEVAYHEKYPTIYHLRKKLVDSTDKADLRLIYLALAHMIKFRGHFLIEGDLNPDNSDVDKLFIQLVQTYNQLFEENPINASGVDAKAILSARLSKSRRLENLIAQLPGEKKNGLFGNLIALSLGLTPNFKSNFDLAEDAKLQLSKDTYDDDLDNLLAQIGDQYADLFLAAKNLSDAILLSDILRVNTEITKAPLSASMIKRYDEHHQDLTLLKALVRQQLPEKYKEIFFDQSKNGYAGYIDGGASQEEFYKFIKPILEKMDGTEELLVKLNREDLLRKQRTFDNGSIPHQIHLGELHAILRRQEDFYPFLKDNREKIEKILTFRIPYYVGPLARGNSRFAWMTRKSEETITPWNFEEVVDKGASAQSFIERMTNFDKNLPNEKVLPKHSLLYEYFTVYNELTKVKYVTEGMRKPAFLSGEQKKAIVDLLFKTNRKVTVKQLKEDYFKKIECFDSVEISGVEDRFNASLGTYHDLLKIIKDKDFLDNEENEDILEDIVLTLTLFEDREMIEERLKTYAHLFDDKVMKQLKRRRYTGWGRLSRKLINGIRDKQSGKTILDFLKSDGFANRNFMQLIHDDSLTFKEDIQKAQVSGQGDSLHEHIANLAGSPAIKKGILQTVKVVDELVKVMGRHKPENIVIEMARENQTTQKGQKNSRERMKRIEEGIKELGSQILKEHPVENTQLQNEKLYLYYLQNGRDMYVDQELDINRLSDYDVDHIVPQSFLKDDSIDNKVLTRSDKARGKSDNVPSEEVVKKMKNYWRQLLNAKLITQRKFDNLTKAERGGLSELDKAGFIKRQLVETRQITKHVAQILDSRMNTKYDENDKLIREVKVITLKSKLVSDFRKDFQFYKVREINNYHHAHDAYLNAVVGTALIKKYPKLESEFVYGDYKVYDVRKMIAKSEQEIGKATAKYFFYSNIMNFFKTEITLANGEIRKRPLIETNGETGEIVWDKGRDFATVRKVLSMPQVNIVKKTEVQTGGFSKESILPKRNSDKLIARKKDWDPKKYGGFDSPTVAYSVLVVAKVEKGKSKKLKSVKELLGITIMERSSFEKNPIDFLEAKGYKEVKKDLIIKLPKYSLFELENGRKRMLASAGELQKGNELALPSKYVNFLYLASHYEKLKGSPEDNEQKQLFVEQHKHYLDEIIEQISEFSKRVILADANLDKVLSAYNKHRDKPIREQAENIIHLFTLTNLGAPAAFKYFDTTIDRKRYTSTKEVLDATLIHQSITGLYETRIDLSQLGGDGGEAAAKPAPGGSGGVLNLEEEYRLHEKPVPSSIDPSWLQLFPTVWAERAGMGLANQVPPVVVELRSGASPVAVRQYPMSKEAREGIRPHIQRFLDLGVLVPCQSPWNTPLLPVKKPGTNDYRPVQDLREINKRVQDIHPTVPNPYNLLSSLPPSHTWYSVLDLKDAFFCLKLHPNSQPLFAFEWRDPEKGNTGQLTWTRLPQGFKNSPTLFNEALHRDLAPFRALNPQVVLLQYVDDLLVAAPTYRDCKEGTQKLLQELSKLGYRVSAKKAQLCQKEVTYLGYLLKEGKRWLTPARKATVMKIPPPTTPRQVREFLGTAGFCRLWIPGFASLAAPLYPLTKPSIPFIWTEEHQKAFDRIKEALLSAPALALPDLTKPFTLYVDERAGVARGVLTQTLGPWRRPVAYLSKKLDPVASGWPTCLKAVAAVALLLKDADKLTLGQNVTVIASHSLESIVRQPPDRWMTNARMTHYQSLLLNERVSFAPPAVLNPATLLPVESEATPVHRCSEILAEETGTRRDLKDQPLPGVPAWYTDGSSFIAEGKRRAGAAIVDGKRTVWASSLPEGTSAQKAELVALTQALRLAEGKDINIYTDSRYAFATAHIHGAIYKQRGWLTSAGKDIKNKEEILALLEAIHLPKRVAIIHCPGHQKGNDPVATGNRRADEAAKQAALSTRVLAETTKPAGKRTADGSEFEKRTADGSEFESPKKKAKVE

SEQ ID NO: 7241 - protein, 2096 aa, synthetic construct
MPAAKRVKLDGGDKKYSIGLDIGTNSVGWAVITDEYKVPSKKFKVLGNTDRHSIKKNLIGALLFDSGETAEATRLKRTARRRYTRRKNRICYLQEIFSNEMAKVDDSFFHRLEESFLVEEDKKHERHPIFGNIVDEVAYHEKYPTIYHLRKKLVDSTDKADLRLIYLALAHMIKFRGHFLIEGDLNPDNSDVDKLFIQLVQTYNQLFEENPINASGVDAKAILSARLSKSRRLENLIAQLPGEKKNGLFGNLIALSLGLTPNFKSNFDLAEDAKLQLSKDTYDDDLDNLLAQIGDQYADLFLAAKNLSDAILLSDILRVNTEITKAPLSASMIKRYDEHHQDLTLLKALVRQQLPEKYKEIFFDQSKNGYAGYIDGGASQEEFYKFIKPILEKMDGTEELLVKLNREDLLRKQRTFDNGSIPHQIHLGELHAILRRQEDFYPFLKDNREKIEKILTFRIPYYVGPLARGNSRFAWMTRKSEETITPWNFEEVVDKGASAQSFIERMTNFDKNLPNEKVLPKHSLLYEYFTVYNELTKVKYVTEGMRKPAFLSGEQKKAIVDLLFKTNRKVTVKQLKEDYFKKIECFDSVEISGVEDRFNASLGTYHDLLKIIKDKDFLDNEENEDILEDIVLTLTLFEDREMIEERLKTYAHLFDDKVMKQLKRRRYTGWGRLSRKLINGIRDKQSGKTILDFLKSDGFANRNFMQLIHDDSLTFKEDIQKAQVSGQGDSLHEHIANLAGSPAIKKGILQTVKVVDELVKVMGRHKPENIVIEMARENQTTQKGQKNSRERMKRIEEGIKELGSQILKEHPVENTQLQNEKLYLYYLQNGRDMYVDQELDINRLSDYDVDHIVPQSFLKDDSIDNKVLTRSDKARGKSDNVPSEEVVKKMKNYWRQLLNAKLITQRKFDNLTKAERGGLSELDKAGFIKRQLVETRQITKHVAQILDSRMNTKYDENDKLIREVKVITLKSKLVSDFRKDFQFYKVREINNYHHAHDAYLNAVVGTALIKKYPKLESEFVYGDYKVYDVRKMIAKSEQEIGKATAKYFFYSNIMNFFKTEITLANGEIRKRPLIETNGETGEIVWDKGRDFATVRKVLSMPQVNIVKKTEVQTGGFSKESILPKRNSDKLIARKKDWDPKKYGGFDSPTVAYSVLVVAKVEKGKSKKLKSVKELLGITIMERSSFEKNPIDFLEAKGYKEVKKDLIIKLPKYSLFELENGRKRMLASAGELQKGNELALPSKYVNFLYLASHYEKLKGSPEDNEQKQLFVEQHKHYLDEIIEQISEFSKRVILADANLDKVLSAYNKHRDKPIREQAENIIHLFTLTNLGAPAAFKYFDTTIDRKRYTSTKEVLDATLIHQSITGLYETRIDLSQLGGDGGEAAAKPAPGGSGGTLNIEDEYRLHETSKEPDVPLGSTWLSDFPQAWAETGGMGLAVRQAPLIIPLKATSTPVSIKQYPMSQEARLGIKPHIQRLLDQGILVPCQSPWNTPLLPVKKPGTNDYRPVQDLREVNKRVEDIHPTVPNPYNLLSGLPPSHQWYTVLDLKDAFFCLRLHPTSQPLFAFEWRDPEMGISGQLTWTRLPQGFKNSPTLFDEALHRDLADFRIQHPDLILLQYVDDLLLAATSEQDCQRGTRALLQTLGNLGYRASAKKAQICQKQVKYLGYLLKEGQRWLTEARKETVMGQPTPKTPRQLREFLGTAGFCRLWIPGFAEMAAPLYPLTKTGTLFNWGPDQQKAYQEIKQALLTAPALGLPDLTKPFELFVDEKQGYAKGVLTQKLGPWRRPVAYLSKKLDPVAAGWPPCLRMVAAIAVLTKDAGKLTMGQPLVILAPHAVEALVKQPPDRWLSNARMTHYQAMLLDTDRVQFGPVVALNPATLLPLPEKEAPHDCLEILAETHGTRPDLTDQPIPDADYTWYTDGSSFLQEGQRRAGAAVTTETEVIWARALPAGTSAQRAELIALTQALKMAEGKKLNVYTDSRYAFATAHVHGEIYRRRGLLTSEGREIKNKNEILALLKALFLPKRLSIIHCPGHQKGNSAEARGNRMADQAAREAAMKAVLETSTLLAGKRTADGSEFEKRTADGSEFESPKKKAKVE

SEQ ID NO: 7242 - protein, 2096 aa, synthetic construct; identical to SEQ ID NO: 4527

SEQ ID NO: 7243 - protein, 2098 aa, synthetic construct
MPAAKRVKLDGGDKKYSIGLDIGTNSVGWAVITDEYKVPSKKFKVLGNTDRHSIKKNLIGALLFDSGETAEATRLKRTARRRYTRRKNRICYLQEIFSNEMAKVDDSFFHRLEESFLVEEDKKHERHPIFGNIVDEVAYHEKYPTIYHLRKKLVDSTDKADLRLIYLALAHMIKFRGHFLIEGDLNPDNSDVDKLFIQLVQTYNQLFEENPINASGVDAKAILSARLSKSRRLENLIAQLPGEKKNGLFGNLIALSLGLTPNFKSNFDLAEDAKLQLSKDTYDDDLDNLLAQIGDQYADLFLAAKNLSDAILLSDILRVNTEITKAPLSASMIKRYDEHHQDLTLLKALVRQQLPEKYKEIFFDQSKNGYAGYIDGGASQEEFYKFIKPILEKMDGTEELLVKLNREDLLRKQRTFDNGSIPHQIHLGELHAILRRQEDFYPFLKDNREKIEKILTFRIPYYVGPLARGNSRFAWMTRKSEETITPWNFEEVVDKGASAQSFIERMTNFDKNLPNEKVLPKHSLLYEYFTVYNELTKVKYVTEGMRKPAFLSGEQKKAIVDLLFKTNRKVTVKQLKEDYFKKIECFDSVEISGVEDRFNASLGTYHDLLKIIKDKDFLDNEENEDILEDIVLTLTLFEDREMIEERLKTYAHLFDDKVMKQLKRRRYTGWGRLSRKLINGIRDKQSGKTILDFLKSDGFANRNFMQLIHDDSLTFKEDIQKAQVSGQGDSLHEHIANLAGSPAIKKGILQTVKVVDELVKVMGRHKPENIVIEMARENQTTQKGQKNSRERMKRIEEGIKELGSQILKEHPVENTQLQNEKLYLYYLQNGRDMYVDQELDINRLSDYDVDHIVPQSFLKDDSIDNKVLTRSDKARGKSDNVPSEEVVKKMKNYWRQLLNAKLITQRKFDNLTKAERGGLSELDKAGFIKRQLVETRQITKHVAQILDSRMNTKYDENDKLIREVKVITLKSKLVSDFRKDFQFYKVREINNYHHAHDAYLNAVVGTALIKKYPKLESEFVYGDYKVYDVRKMIAKSEQEIGKATAKYFFYSNIMNFFKTEITLANGEIRKRPLIETNGETGEIVWDKGRDFATVRKVLSMPQVNIVKKTEVQTGGFSKESILPKRNSDKLIARKKDWDPKKYGGFDSPTVAYSVLVVAKVEKGKSKKLKSVKELLGITIMERSSFEKNPIDFLEAKGYKEVKKDLIIKLPKYSLFELENGRKRMLASAGELQKGNELALPSKYVNFLYLASHYEKLKGSPEDNEQKQLFVEQHKHYLDEIIEQISEFSKRVILADANLDKVLSAYNKHRDKPIREQAENIIHLFTLTNLGAPAAFKYFDTTIDRKRYTSTKEVLDATLIHQSITGLYETRIDLSQLGGDGGPAPGGSEAAAKGGTAPLEEEYRLFLEAPIQNVTLLEQWKREIPKVWAEINPPGLASTQAPIHVQLLSTALPVRVRQYPITLEAKRSLRETIRKFRAAGILRPVHSPWNTPLLPVRKSGTSEYRMVQDLREVNKRVETIHPTVPNPYTLLSLLPPDRIWYSVLDLKDAFFCIPLAPESQLIFAFEWADAEEGESGQLTWTRLPQGFKNSPTLFDEALNRDLQGFRLDHPSVSLLQYVDDLLIAADTQAACLSATRDLLMTLAELGYRVSGKKAQLCQEEVTYLGFKIHKGSRSLSNSRTQAILQIPVPKTKRQVREFLGTIGYCRLWIPGFAELAQPLYAATRGGNDPLVWGEKEEEAFQSLKLALTQPPALALPSLDKPFQLFVEETSGAAKGVLTQALGPWKRPVAYLSKRLDPVAAGWPRCLRAIAAAALLTREASKLTFGQDIEITSSHNLESLLRSPPDKWLTNARITQYQVLLLDPPRVRFKQTAALNPATLLPETDDTLPIHHCLDTLDSLTSTRPDLTDQPLAQAEATLFTDGSSYIRDGKRYAGAAVVTLDSVIWAEPLPIGTSAQKAELIALTKALEWSKDKSVNIYTDSRYAFATLHVHGMIYRERGLLTAGGKAIKNAPEILALLTAVWLPKRVAVMHCKGHQKDDAPTSTGNRRADEVAREVAIRPLSTQATISAGKRTADGSEFEKRTADGSEFESPKKKAKVE

SEQ ID NO: 7244 - protein, 2098 aa, synthetic construct
MPAAKRVKLDGGDKKYSIGLDIGTNSVGWAVITDEYKVPSKKFKVLGNTDRHSIKKNLIGALLFDSGETAEATRLKRTARRRYTRRKNRICYLQEIFSNEMAKVDDSFFHRLEESFLVEEDKKHERHPIFGNIVDEVAYHEKYPTIYHLRKKLVDSTDKADLRLIYLALAHMIKFRGHFLIEGDLNPDNSDVDKLFIQLVQTYNQLFEENPINASGVDAKAILSARLSKSRRLENLIAQLPGEKKNGLFGNLIALSLGLTPNFKSNFDLAEDAKLQLSKDTYDDDLDNLLAQIGDQYADLFLAAKNLSDAILLSDILRVNTEITKAPLSASMIKRYDEHHQDLTLLKALVRQQLPEKYKEIFFDQSKNGYAGYIDGGASQEEFYKFIKPILEKMDGTEELLVKLNREDLLRKQRTFDNGSIPHQIHLGELHAILRRQEDFYPFLKDNREKIEKILTFRIPYYVGPLARGNSRFAWMTRKSEETITPWNFEEVVDKGASAQSFIERMTNFDKNLPNEKVLPKHSLLYEYFTVYNELTKVKYVTEGMRKPAFLSGEQKKAIVDLLFKTNRKVTVKQLKEDYFKKIECFDSVEISGVEDRFNASLGTYHDLLKIIKDKDFLDNEENEDILEDIVLTLTLFEDREMIEERLKTYAHLFDDKVMKQLKRRRYTGWGRLSRKLINGIRDKQSGKTILDFLKSDGFANRNFMQLIHDDSLTFKEDIQKAQVSGQGDSLHEHIANLAGSPAIKKGILQTVKVVDELVKVMGRHKPENIVIEMARENQTTQKGQKNSRERMKRIEEGIKELGSQILKEHPVENTQLQNEKLYLYYLQNGRDMYVDQELDINRLSDYDVDHIVPQSFLKDDSIDNKVLTRSDKARGKSDNVPSEEVVKKMKNYWRQLLNAKLITQRKFDNLTKAERGGLSELDKAGFIKRQLVETRQITKHVAQILDSRMNTKYDENDKLIREVKVITLKSKLVSDFRKDFQFYKVREINNYHHAHDAYLNAVVGTALIKKYPKLESEFVYGDYKVYDVRKMIAKSEQEIGKATAKYFFYSNIMNFFKTEITLANGEIRKRPLIETNGETGEIVWDKGRDFATVRKVLSMPQVNIVKKTEVQTGGFSKESILPKRNSDKLIARKKDWDPKKYGGFDSPTVAYSVLVVAKVEKGKSKKLKSVKELLGITIMERSSFEKNPIDFLEAKGYKEVKKDLIIKLPKYSLFELENGRKRMLASAGELQKGNELALPSKYVNFLYLASHYEKLKGSPEDNEQKQLFVEQHKHYLDEIIEQISEFSKRVILADANLDKVLSAYNKHRDKPIREQAENIIHLFTLTNLGAPAAFKYFDTTIDRKRYTSTKEVLDATLIHQSITGLYETRIDLSQLGGDGGPAPGGSEAAAKGGTAPLEEEYRLFLEAPIQNVTLLEQWKREIPKVWAEINPPGLASTQAPIHVQLLSTALPVRVRQYPITLEAKRSLRETIRKFRAAGILRPVHSPWNTPLLPVRKSGTSEYRMVQDLREVNKRVETIHPTVPNPYTLLSLLPPDRIWYSVLDLKDAFFCIPLAPESQLIFAFEWADAEEGESGQLTWTRLPQGFKNSPTLFNEALNRDLQGFRLDHPSVSLLQYVDDLLIAADTQAACLSATRDLLMTLAELGYRVSGKKAQLCQEEVTYLGFKIHKGSRSLSNSRTQAILQIPVPKTKRQVREFLGTIGYCRLWIPGFAELAQPLYAATRPGNDPLVWGEKEEEAFQSLKLALTQPPALALPSLDKPFQLFVEETSGAAKGVLTQALGPWKRPVAYLSKRLDPVAAGWPRCLRAIAAAALLTREASKLTFGQDIEITSSHNLESLLRSPPDKWLTNARITQYQVLLLDPPRVRFKQTAALNPATLLPETDDTLPIHHCLDTLDSLTSTRPDLTDQPLAQAEATLFTDGSSYIRDGKRYAGAAVVTLDSVIWAEPLPIGTSAQKAELIALTKALEWSKDKSVNIYTDSRYAFATLHVHGMIYRERGWLTAGGKAIKNAPEILALLTAVWLPKRVAVMHCKGHQKDDAPTSTGNRRADEVAREVAIRPLSTQATISAGKRTADGSEFEKRTADGSEFESPKKKAKVE

SEQ ID NO: 7245 - protein, 2095 aa, synthetic construct
MPAAKRVKLDGGDKKYSIGLDIGTNSVGWAVITDEYKVPSKKFKVLGNTDRHSIKKNLIGALLFDSGETAEATRLKRTARRRYTRRKNRICYLQEIFSNEMAKVDDSFFHRLEESFLVEEDKKHERHPIFGNIVDEVAYHEKYPTIYHLRKKLVDSTDKADLRLIYLALAHMIKFRGHFLIEGDLNPDNSDVDKLFIQLVQTYNQLFEENPINASGVDAKAILSARLSKSRRLENLIAQLPGEKKNGLFGNLIALSLGLTPNFKSNFDLAEDAKLQLSKDTYDDDLDNLLAQIGDQYADLFLAAKNLSDAILLSDILRVNTEITKAPLSASMIKRYDEHHQDLTLLKALVRQQLPEKYKEIFFDQSKNGYAGYIDGGASQEEFYKFIKPILEKMDGTEELLVKLNREDLLRKQRTFDNGSIPHQIHLGELHAILRRQEDFYPFLKDNREKIEKILTFRIPYYVGPLARGNSRFAWMTRKSEETITPWNFEEVVDKGASAQSFIERMTNFDKNLPNEKVLPKHSLLYEYFTVYNELTKVKYVTEGMRKPAFLSGEQKKAIVDLLFKTNRKVTVKQLKEDYFKKIECFDSVEISGVEDRFNASLGTYHDLLKIIKDKDFLDNEENEDILEDIVLTLTLFEDREMIEERLKTYAHLFDDKVMKQLKRRRYTGWGRLSRKLINGIRDKQSGKTILDFLKSDGFANRNFMQLIHDDSLTFKEDIQKAQVSGQGDSLHEHIANLAGSPAIKKGILQTVKVVDELVKVMGRHKPENIVIEMARENQTTQKGQKNSRERMKRIEEGIKELGSQILKEHPVENTQLQNEKLYLYYLQNGRDMYVDQELDINRLSDYDVDHIVPQSFLKDDSIDNKVLTRSDKARGKSDNVPSEEVVKKMKNYWRQLLNAKLITQRKFDNLTKAERGGLSELDKAGFIKRQLVETRQITKHVAQILDSRMNTKYDENDKLIREVKVITLKSKLVSDFRKDFQFYKVREINNYHHAHDAYLNAVVGTALIKKYPKLESEFVYGDYKVYDVRKMIAKSEQEIGKATAKYFFYSNIMNFFKTEITLANGEIRKRPLIETNGETGEIVWDKGRDFATVRKVLSMPQVNIVKKTEVQTGGFSKESILPKRNSDKLIARKKDWDPKKYGGFDSPTVAYSVLVVAKVEKGKSKKLKSVKELLGITIMERSSFEKNPIDFLEAKGYKEVKKDLIIKLPKYSLFELENGRKRMLASAGELQKGNELALPSKYVNFLYLASHYEKLKGSPEDNEQKQLFVEQHKHYLDEIIEQISEFSKRVILADANLDKVLSAYNKHRDKPIREQAENIIHLFTLTNLGAPAAFKYFDTTIDRKRYTSTKEVLDATLIHQSITGLYETRIDLSQLGGDGGPAPGGSEAAAKGGTLQLEEEYRLFEPESTQKQEMDIWLKNFPQAWAETGGMGTAHCQAPVLIQLKATATPISIRQYPMPHEAYQGIKPHIRRMLDQGILKPCQSPWNTPLLPVKKPGTEDYRPVQDLREVNKRVEDIHPTVPNPYNLLSTLPPSHPWYTVLDLKDAFFCLRLHSESQLLFAFEWRDPEIGLSGQLTWTRLPQGFKNSPTLFNEALHSDLADFRVRYPALVLLQYVDDLLLAAATRTECLEGTKALLETLGNKGYRASAKKAQICLQEVTYLGYSLKDGQRWLTKARKEAILSIPVPKNSRQVREFLGTAGYCRLWIPGFAELAAPLYPLTRPGTLFQWGTEQQLAFEDIKKALLSSPALGLPDITKPFELFIDENSGFAKGVLVQKLGPWKRPVAYLSKKLDTVASGWPPCLRMVAAIAILVKDAGKLTLGQPLTILTSHPVEALVRQPPNKWLSNARMTHYQAMLLDAERVHFGPTVSLNPATLLPLPSGGNHHDCLQILAETHGTRPDLTDQPLPDADLTWYTDGSSFIRNGEREAGAAVTTESEVIWAAPLPPGTSAQRAELIALTQALKMAEGKKLTVYTDSRYAFATTHVHGEIYRRRGWLTSEGKEIKNKNEILALLEALFLPKRLSIIHCPGHQKGDSPQAKGNRLADDTAKKAATETHSSLTVLPAGKRTADGSEFEKRTADGSEFESPKKKAKVE

SEQ ID NO: 7246 - protein, 2096 aa, synthetic construct
MPAAKRVKLDGGDKKYSIGLDIGTNSVGWAVITDEYKVPSKKFKVLGNTDRHSIKKNLIGALLFDSGETAEATRLKRTARRRYTRRKNRICYLQEIFSNEMAKVDDSFFHRLEESFLVEEDKKHERHPIFGNIVDEVAYHEKYPTIYHLRKKLVDSTDKADLRLIYLALAHMIKFRGHFLIEGDLNPDNSDVDKLFIQLVQTYNQLFEENPINASGVDAKAILSARLSKSRRLENLIAQLPGEKKNGLFGNLIALSLGLTPNFKSNFDLAEDAKLQLSKDTYDDDLDNLLAQIGDQYADLFLAAKNLSDAILLSDILRVNTEITKAPLSASMIKRYDEHHQDLTLLKALVRQQLPEKYKEIFFDQSKNGYAGYIDGGASQEEFYKFIKPILEKMDGTEELLVKLNREDLLRKQRTFDNGSIPHQIHLGELHAILRRQEDFYPFLKDNREKIEKILTFRIPYYVGPLARGNSRFAWMTRKSEETITPWNFEEVVDKGASAQSFIERMTNFDKNLPNEKVLPKHSLLYEYFTVYNELTKVKYVTEGMRKPAFLSGEQKKAIVDLLFKTNRKVTVKQLKEDYFKKIECFDSVEISGVEDRFNASLGTYHDLLKIIKDKDFLDNEENEDILEDIVLTLTLFEDREMIEERLKTYAHLFDDKVMKQLKRRRYTGWGRLSRKLINGIRDKQSGKTILDFLKSDGFANRNFMQLIHDDSLTFKEDIQKAQVSGQGDSLHEHIANLAGSPAIKKGILQTVKVVDELVKVMGRHKPENIVIEMARENQTTQKGQKNSRERMKRIEEGIKELGSQILKEHPVENTQLQNEKLYLYYLQNGRDMYVDQELDINRLSDYDVDHIVPQSFLKDDSIDNKVLTRSDKARGKSDNVPSEEVVKKMKNYWRQLLNAKLITQRKFDNLTKAERGGLSELDKAGFIKRQLVETRQITKHVAQILDSRMNTKYDENDKLIREVKVITLKSKLVSDFRKDFQFYKVREINNYHHAHDAYLNAVVGTALIKKYPKLESEFVYGDYKVYDVRKMIAKSEQEIGKATAKYFFYSNIMNFFKTEITLANGEIRKRPLIETNGETGEIVWDKGRDFATVRKVLSMPQVNIVKKTEVQTGGFSKESILPKRNSDKLIARKKDWDPKKYGGFDSPTVAYSVLVVAKVEKGKSKKLKSVKELLGITIMERSSFEKNPIDFLEAKGYKEVKKDLIIKLPKYSLFELENGRKRMLASAGELQKGNELALPSKYVNFLYLASHYEKLKGSPEDNEQKQLFVEQHKHYLDEIIEQISEFSKRVILADANLDKVLSAYNKHRDKPIREQAENIIHLFTLTNLGAPAAFKYFDTTIDRKRYTSTKEVLDATLIHQSITGLYETRIDLSQLGGDGGPAPGGSEAAAKGGTLGIEDEYRLHETSTEPDVSLGSTWLSDFPQAWAETGGMGLAVRQAPLIIPLKATSTPVSIQQYPMSHEARLGIKPHIQRLLDQGILVPCQSPWNTPLLPVKKPGTNDYRPVQDLREVNKRVEDIHPTVPNPYNLLSGLPPSHQWYTVLDLKDAFFCLRLHPTSQPLFAFEWRDPGMGISGQLTWTRLPQGFKNSPTLFNEALHRDLADFRIQHPDLILLQYVDDILLAATSELDCQQGTRALLQTLGDLGYRASAKKAQICQKQVKYLGYLLREGQRWLTEARKETVMGQPVPKTPRQLREFLGTAGFCRLWIPGFAEMAAPLYPLTKPGTLFSWGPDQQKAYQEIKQALLTAPALGLPDLTKPFELFVDEKQGYAKGVLTQKLGPWRRPVAYLSKKLDPVAAGWPPCLRMVAAIAVLTKDAGKLTMGQPLVILAPHAVEALVKQPPDRWLSNARMTHYQAMLLDTDRVQFGPVVALNPATLLPLPEEGAPHDCLEILAETHGTRPDLTDQPIPDADHTWYTDGSSFLQEGQRKAGAAVTTETEVIWAGALPAGTSAQRAELIALTQALKMAEGKRLNVYTDSRYAFATAHIHGEIYRRRGWLTSEGREIKNKSEILALLKALFLPKRLSIIHCLGHQKGDSAEARGNRLADQAAREAAIKTPPDTSTLLAGKRTADGSEFEKRTADGSEFESPKKKAKVE

SEQ ID NO: 7247 - protein, 2096 aa, synthetic construct
MPAAKRVKLDGGDKKYSIGLDIGTNSVGWAVITDEYKVPSKKFKVLGNTDRHSIKKNLIGALLFDSGETAEATRLKRTARRRYTRRKNRICYLQEIFSNEMAKVDDSFFHRLEESFLVEEDKKHERHPIFGNIVDEVAYHEKYPTIYHLRKKLVDSTDKADLRLIYLALAHMIKFRGHFLIEGDLNPDNSDVDKLFIQLVQTYNQLFEENPINASGVDAKAILSARLSKSRRLENLIAQLPGEKKNGLFGNLIALSLGLTPNFKSNFDLAEDAKLQLSKDTYDDDLDNLLAQIGDQYADLFLAAKNLSDAILLSDILRVNTEITKAPLSASMIKRYDEHHQDLTLLKALVRQQLPEKYKEIFFDQSKNGYAGYIDGGASQEEFYKFIKPILEKMDGTEELLVKLNREDLLRKQRTFDNGSIPHQIHLGELHAILRRQEDFYPFLKDNREKIEKILTFRIPYYVGPLARGNSRFAWMTRKSEETITPWNFEEVVDKGASAQSFIERMTNFDKNLPNEKVLPKHSLLYEYFTVYNELTKVKYVTEGMRKPAFLSGEQKKAIVDLLFKTNRKVTVKQLKEDYFKKIECFDSVEISGVEDRFNASLGTYHDLLKIIKDKDFLDNEENEDILEDIVLTLTLFEDREMIEERLKTYAHLFDDKVMKQLKRRRYTGWGRLSRKLINGIRDKQSGKTILDFLKSDGFANRNFMQLIHDDSLTFKEDIQKAQVSGQGDSLHEHIANLAGSPAIKKGILQTVKVVDELVKVMGRHKPENIVIEMARENQTTQKGQKNSRERMKRIEEGIKELGSQILKEHPVENTQLQNEKLYLYYLQNGRDMYVDQELDINRLSDYDVDHIVPQSFLKDDSIDNKVLTRSDKARGKSDNVPSEEVVKKMKNYWRQLLNAKLITQRKFDNLTKAERGGLSELDKAGFIKRQLVETRQITKHVAQILDSRMNTKYDENDKLIREVKVITLKSKLVSDFRKDFQFYKVREINNYHHAHDAYLNAVVGTALIKKYPKLESEFVYGDYKVYDVRKMIAKSEQEIGKATAKYFFYSNIMNFFKTEITLANGEIRKRPLIETNGETGEIVWDKGRDFATVRKVLSMPQVNIVKKTEVQTGGFSKESILPKRNSDKLIARKKDWDPKKYGGFDSPTVAYSVLVVAKVEKGKSKKLKSVKELLGITIMERSSFEKNPIDFLEAKGYKEVKKDLIIKLPKYSLFELENGRKRMLASAGELQKGNELALPSKYVNFLYLASHYEKLKGSPEDNEQKQLFVEQHKHYLDEIIEQISEFSKRVILADANLDKVLSAYNKHRDKPIREQAENIIHLFTLTNLGAPAAFKYFDTTIDRKRYTSTKEVLDATLIHQSITGLYETRIDLSQLGGDGGPAPGGSEAAAKGGTLNIEDEYRLHETSKGPDVPLGSTWLSDFPQAWAETGGMGLAVRQAPLIIPLKATSTPVSIKQYPMSQEARLGIKPHIQRLLDQGILVPCQSPWNTPLLPVKKPGTNDYRPVQDLREVNKRVEDIHPTVPNPYNLLSGLPPSHQWYTVLDLKDAFFCLRLHPTSQSLFAFEWRDPEMGISGQLTWTRLPQGFKNSPTLFDEALHRDLADFRIQHPDLILLQYVDDLLLAATSELDCQQGTRALLQTLGDLGYRASAKKAQICQKQVKYLGYLLKEGQRWLTEARKETVMGQPTPKTPRQLREFLGTAGFCRLWIPGFAEMAAPLYPLTKTGTLFEWGPDQQKAYQEIKQALLTAPALGLPDLTKPFELFVDEKQGYAKGVLTQKLGPWRRPVAYLSKKLDPVAAGWPPCLRMVAAIAVLTKDAGKLTMGQPLVILAPHAVEALVKQPPDRWLSNARMTHYQALLLDTDRVQFGPIVALNPATLLPLPEEGLQHDCLDILAEAHGTRPDLTDQPLPDADHTWYTDGSSFLQEGQRKAGAAVTTETEVVWAKALPAGTSAQRAELIALTQALKMAEGKKLNVYTDSRYAFATAHIHGEIYRRRGLLTSEGKEIKNKDEILALLKALFLPKRLSIIHCPGHQKGNRAEARGNRMADQAAREVATRETPETSTLLAGKRTADGSEFEKRTADGSEFESPKKKAKVE

SEQ ID NO: 7248 - protein, 2090 aa, synthetic construct
MPAAKRVKLDGGDKKYSIGLDIGTNSVGWAVITDEYKVPSKKFKVLGNTDRHSIKKNLIGALLFDSGETAEATRLKRTARRRYTRRKNRICYLQEIFSNEMAKVDDSFFHRLEESFLVEEDKKHERHPIFGNIVDEVAYHEKYPTIYHLRKKLVDSTDKADLRLIYLALAHMIKFRGHFLIEGDLNPDNSDVDKLFIQLVQTYNQLFEENPINASGVDAKAILSARLSKSRRLENLIAQLPGEKKNGLFGNLIALSLGLTPNFKSNFDLAEDAKLQLSKDTYDDDLDNLLAQIGDQYADLFLAAKNLSDAILLSDILRVNTEITKAPLSASMIKRYDEHHQDLTLLKALVRQQLPEKYKEIFFDQSKNGYAGYIDGGASQEEFYKFIKPILEKMDGTEELLVKLNREDLLRKQRTFDNGSIPHQIHLGELHAILRRQEDFYPFLKDNREKIEKILTFRIPYYVGPLARGNSRFAWMTRKSEETITPWNFEEVVDKGASAQSFIERMTNFDKNLPNEKVLPKHSLLYEYFTVYNELTKVKYVTEGMRKPAFLSGEQKKAIVDLLFKTNRKVTVKQLKEDYFKKIECFDSVEISGVEDRFNASLGTYHDLLKIIKDKDFLDNEENEDILEDIVLTLTLFEDREMIEERLKTYAHLFDDKVMKQLKRRRYTGWGRLSRKLINGIRDKQSGKTILDFLKSDGFANRNFMQLIHDDSLTFKEDIQKAQVSGQGDSLHEHIANLAGSPAIKKGILQTVKVVDELVKVMGRHKPENIVIEMARENQTTQKGQKNSRERMKRIEEGIKELGSQILKEHPVENTQLQNEKLYLYYLQNGRDMYVDQELDINRLSDYDVDHIVPQSFLKDDSIDNKVLTRSDKARGKSDNVPSEEVVKKMKNYWRQLLNAKLITQRKFDNLTKAERGGLSELDKAGFIKRQLVETRQITKHVAQILDSRMNTKYDENDKLIREVKVITLKSKLVSDFRKDFQFYKVREINNYHHAHDAYLNAVVGTALIKKYPKLESEFVYGDYKVYDVRKMIAKSEQEIGKATAKYFFYSNIMNFFKTEITLANGEIRKRPLIETNGETGEIVWDKGRDFATVRKVLSMPQVNIVKKTEVQTGGFSKESILPKRNSDKLIARKKDWDPKKYGGFDSPTVAYSVLVVAKVEKGKSKKLKSVKELLGITIMERSSFEKNPIDFLEAKGYKEVKKDLIIKLPKYSLFELENGRKRMLASAGELQKGNELALPSKYVNFLYLASHYEKLKGSPEDNEQKQLFVEQHKHYLDEIIEQISEFSKRVILADANLDKVLSAYNKHRDKPIREQAENIIHLFTLTNLGAPAAFKYFDTTIDRKRYTSTKEVLDATLIHQSITGLYETRIDLSQLGGDGGPAPGGSEAAAKGGTLQLDDEYRLYSPLVKPDQNIQFWLEQFPQAWAETAGMGLAKQVPPQVIQLKASATPVSVRQYPLSKEAQEGIRPHVQRLIQQGILVPVQSPWNTPLLPVRKPGTNDYRPVQDLREVNKRVQDIHPTVPNPYNLLCALPPQRSWYTVLDLKDAFFCLRLHPTSQPLFAFEWRDPGTGRTGQLTWTRLPQGFKNSPTIFDEALHRDLANFRIQHPQVTLLQYVDDLLLAGATKQDCLEGTKALLLELSDLGYRASAKKAQICRREVTYLGYSLRDGQRWLTEARKKTVVQIPAPTTAKQVREFLGTAGFCRLWIPGFATLAAPLYPLTKEKGEFSWAPEHQKAFDAIKKALLSAPALALPDVTKPFTLYVDERKGVARGVLTQTLGPWRRPVAYLSKKLDPVASGWPVCLKAIAAVAILVKDADKLTLGQNITVIAPHALENIVRQPPDRWMTNARMTHYQSLLLTERVTFAPPAALNPATLLPEETDEPVTHDCHQLLIEETGVRKDLTDIPLTGEVLTWFTDGSSYVVEGKRMAGAAVVDGTRTIWASSLPEGTSAQKAELMALTQALRLAEGKSINIYTDSRYAFATAHVHGAIYKQRGLLTSAGREIKNKEEILSLLEALHLPKRLAIIHCPGHQKAKDPISRGNQMADRVAKQAAQGVNLLAGKRTADGSEFEKRTADGSEFESPKKKAKVE

SEQ ID NO: 7249 - protein, 2176 aa, synthetic construct
MPAAKRVKLDGGDKKYSIGLDIGTNSVGWAVITDEYKVPSKKFKVLGNTDRHSIKKNLIGALLFDSGETAEATRLKRTARRRYTRRKNRICYLQEIFSNEMAKVDDSFFHRLEESFLVEEDKKHERHPIFGNIVDEVAYHEKYPTIYHLRKKLVDSTDKADLRLIYLALAHMIKFRGHFLIEGDLNPDNSDVDKLFIQLVQTYNQLFEENPINASGVDAKAILSARLSKSRRLENLIAQLPGEKKNGLFGNLIALSLGLTPNFKSNFDLAEDAKLQLSKDTYDDDLDNLLAQIGDQYADLFLAAKNLSDAILLSDILRVNTEITKAPLSASMIKRYDEHHQDLTLLKALVRQQLPEKYKEIFFDQSKNGYAGYIDGGASQEEFYKFIKPILEKMDGTEELLVKLNREDLLRKQRTFDNGSIPHQIHLGELHAILRRQEDFYPFLKDNREKIEKILTFRIPYYVGPLARGNSRFAWMTRKSEETITPWNFEEVVDKGASAQSFIERMTNFDKNLPNEKVLPKHSLLYEYFTVYNELTKVKYVTEGMRKPAFLSGEQKKAIVDLLFKTNRKVTVKQLKEDYFKKIECFDSVEISGVEDRFNASLGTYHDLLKIIKDKDFLDNEENEDILEDIVLTLTLFEDREMIEERLKTYAHLFDDKVMKQLKRRRYTGWGRLSRKLINGIRDKQSGKTILDFLKSDGFANRNFMQLIHDDSLTFKEDIQKAQVSGQGDSLHEHIANLAGSPAIKKGILQTVKVVDELVKVMGRHKPENIVIEMARENQTTQKGQKNSRERMKRIEEGIKELGSQILKEHPVENTQLQNEKLYLYYLQNGRDMYVDQELDINRLSDYDVDHIVPQSFLKDDSIDNKVLTRSDKARGKSDNVPSEEVVKKMKNYWRQLLNAKLITQRKFDNLTKAERGGLSELDKAGFIKRQLVETRQITKHVAQILDSRMNTKYDENDKLIREVKVITLKSKLVSDFRKDFQFYKVREINNYHHAHDAYLNAVVGTALIKKYPKLESEFVYGDYKVYDVRKMIAKSEQEIGKATAKYFFYSNIMNFFKTEITLANGEIRKRPLIETNGETGEIVWDKGRDFATVRKVLSMPQVNIVKKTEVQTGGFSKESILPKRNSDKLIARKKDWDPKKYGGFDSPTVAYSVLVVAKVEKGKSKKLKSVKELLGITIMERSSFEKNPIDFLEAKGYKEVKKDLIIKLPKYSLFELENGRKRMLASAGELQKGNELALPSKYVNFLYLASHYEKLKGSPEDNEQKQLFVEQHKHYLDEIIEQISEFSKRVILADANLDKVLSAYNKHRDKPIREQAENIIHLFTLTNLGAPAAFKYFDTTIDRKRYTSTKEVLDATLIHQSITGLYETRIDLSQLGGDGGPAPGGSEAAAKGGMDPLQLLQPLEAEIKGTKLKAHWNSGATITCVPEAFLEDERPIQTMLIKTIHGEKQQDVYYLTFKVQGRKVEAEVLASPYDYILLNPSDVPWLMKKPLQLTVLVPLHEYQERLLQQTALPKEQKELLQKLFLKYDALWQHWENQVGHRRIKPHNIATGTLAPRPQKQYPINPKAKPSIQIVIDDLLKQGVLIQQNSTMNTPVYPVPKPDGKWRMVLDYREVNKTIPLIAAQNQHSAGILSSIYRGKYKTTLDLTNGFWAHPITPESYWLTAFTWQGKQYCWTRLPQGFLNSPALFTADVVDLLKEIPNVQAYVDDIYISHDDPQEHLEQLEKIFSILLNAGYVVSLKKSEIAQREVEFLGFNITKEGRGLTDTFKQKLLNITPPKDLKQLQSILGLLNFARNFIPNYSELVKPLYTIVANANGKFISWTEDNSNQLQHIISVLNQADNLEERNPETRLIIKVNSSPSAGYIRYYNEGSKRPIMYVNYIFSKAEAKFTQTEKLLTTMHKGLIKAMDLAMGQEILVYSPIVSMTKIQRTPLPERKALPVRWITWMTYLEDPRIQFHYDKSLPELQQIPNVTEDVIAKTKHPSEFAMVFYTDGSAIKHPDVNKSHSAGMGIAQVQFIPEYKIVHQWSIPLGDHTAQLAEIAAVEFACKKALKISGPVLIVTDSFYVAESANKELPYWKSNGFLNNKKKPLRHVSKWKSIAECLQLKPDIIIMHEKGHQQPMTTLHTEGNNLADKLATQGSYVVHAGKRTADGSEFEKRTADGSEFESPKKKAKVE

SEQ ID NO: 7250 - protein, 2094 aa, synthetic construct
MPAAKRVKLDGGDKKYSIGLDIGTNSVGWAVITDEYKVPSKKFKVLGNTDRHSIKKNLIGALLFDSGETAEATRLKRTARRRYTRRKNRICYLQEIFSNEMAKVDDSFFHRLEESFLVEEDKKHERHPIFGNIVDEVAYHEKYPTIYHLRKKLVDSTDKADLRLIYLALAHMIKFRGHFLIEGDLNPDNSDVDKLFIQLVQTYNQLFEENPINASGVDAKAILSARLSKSRRLENLIAQLPGEKKNGLFGNLIALSLGLTPNFKSNFDLAEDAKLQLSKDTYDDDLDNLLAQIGDQYADLFLAAKNLSDAILLSDILRVNTEITKAPLSASMIKRYDEHHQDLTLLKALVRQQLPEKYKEIFFDQSKNGYAGYIDGGASQEEFYKFIKPILEKMDGTEELLVKLNREDLLRKQRTFDNGSIPHQIHLGELHAILRRQEDFYPFLKDNREKIEKILTFRIPYYVGPLARGNSRFAWMTRKSEETITPWNFEEVVDKGASAQSFIERMTNFDKNLPNEKVLPKHSLLYEYFTVYNELTKVKYVTEGMRKPAFLSGEQKKAIVDLLFKTNRKVTVKQLKEDYFKKIECFDSVEISGVEDRFNASLGTYHDLLKIIKDKDFLDNEENEDILEDIVLTLTLFEDREMIEERLKTYAHLFDDKVMKQLKRRRYTGWGRLSRKLINGIRDKQSGKTILDFLKSDGFANRNFMQLIHDDSLTFKEDIQKAQVSGQGDSLHEHIANLAGSPAIKKGILQTVKVVDELVKVMGRHKPENIVIEMARENQTTQKGQKNSRERMKRIEEGIKELGSQILKEHPVENTQLQNEKLYLYYLQNGRDMYVDQELDINRLSDYDVDHIVPQSFLKDDSIDNKVLTRSDKARGKSDNVPSEEVVKKMKNYWRQLLNAKLITQRKFDNLTKAERGGLSELDKAGFIKRQLVETRQITKHVAQILDSRMNTKYDENDKLIREVKVITLKSKLVSDFRKDFQFYKVREINNYHHAHDAYLNAVVGTALIKKYPKLESEFVYGDYKVYDVRKMIAKSEQEIGKATAKYFFYSNIMNFFKTEITLANGEIRKRPLIETNGETGEIVWDKGRDFATVRKVLSMPQVNIVKKTEVQTGGFSKESILPKRNSDKLIARKKDWDPKKYGGFDSPTVAYSVLVVAKVEKGKSKKLKSVKELLGITIMERSSFEKNPIDFLEAKGYKEVKKDLIIKLPKYSLFELENGRKRMLASAGELQKGNELALPSKYVNFLYLASHYEKLKGSPEDNEQKQLFVEQHKHYLDEIIEQISEFSKRVILADANLDKVLSAYNKHRDKPIREQAENIIHLFTLTNLGAPAAFKYFDTTIDRKRYTSTKEVLDATLIHQSITGLYETRIDLSQLGGDGGPAPGGSEAAAKGGVLNLEEEYRLHEKPVPSSIDPSWLQLFPTVWAERAGMGLANQVPPVVVELRSGASPVAVRQYPMSKEAREGIRPHIQRFLDLGVLVPCQSPWNTPLLPVKKPGTNDYRPVQDLREINKRVQDIHPTVPNPYNLLSSLPPSHTWYSVLDLKDAFFCLKLHPNSQPLFAFEWRDPEKGNTGQLTWTRLPQGFKNSPTLFNEALHRDLAPFRALNPQVVLLQYVDDLLVAAPTYRDCKEGTQKLLQELSKLGYRVSAKKAQLCQKEVTYLGYLLKEGKRWLTPARKATVMKIPPPTTPRQVREFLGKAGFCRLFIPGFASLAAPLYPLTKPSIPFIWTEEHQKAFDRIKEALLSAPALALPDLTKPFTLYVDERAGVARGVLTQTLGPWRRPVAYLSKKLDPVASGWPTCLKAVAAVALLLKDADKLTLGQNVTVIASHSLESIVRQPPDRWMTNARMTHYQSLLLNERVSFAPPAVLNPATLLPVESEATPVHRCSEILAEETGTRRDLKDQPLPGVPAWYTDGSSFIAEGKRRAGAAIVDGKRTVWASSLPEGTSAQKAELVALTQALRLAEGKDINIYTDSRYAFATAHIHGAIYKQRGWLTSAGKDIKNKEEILALLEAIHLPKRVAIIHCPGHQKGNDPVATGNRRADEAAKQAALSTRVLAETTKPAGKRTADGSEFEKRTADGSEFESPKKKAKVE

SEQ ID NO: 7251 - protein, 2096 aa, synthetic construct
MPAAKRVKLDGGDKKYSIGLDIGTNSVGWAVITDEYKVPSKKFKVLGNTDRHSIKKNLIGALLFDSGETAEATRLKRTARRRYTRRKNRICYLQEIFSNEMAKVDDSFFHRLEESFLVEEDKKHERHPIFGNIVDEVAYHEKYPTIYHLRKKLVDSTDKADLRLIYLALAHMIKFRGHFLIEGDLNPDNSDVDKLFIQLVQTYNQLFEENPINASGVDAKAILSARLSKSRRLENLIAQLPGEKKNGLFGNLIALSLGLTPNFKSNFDLAEDAKLQLSKDTYDDDLDNLLAQIGDQYADLFLAAKNLSDAILLSDILRVNTEITKAPLSASMIKRYDEHHQDLTLLKALVRQQLPEKYKEIFFDQSKNGYAGYIDGGASQEEFYKFIKPILEKMDGTEELLVKLNREDLLRKQRTFDNGSIPHQIHLGELHAILRRQEDFYPFLKDNREKIEKILTFRIPYYVGPLARGNSRFAWMTRKSEETITPWNFEEVVDKGASAQSFIERMTNFDKNLPNEKVLPKHSLLYEYFTVYNELTKVKYVTEGMRKPAFLSGEQKKAIVDLLFKTNRKVTVKQLKEDYFKKIECFDSVEISGVEDRFNASLGTYHDLLKIIKDKDFLDNEENEDILEDIVLTLTLFEDREMIEERLKTYAHLFDDKVMKQLKRRRYTGWGRLSRKLINGIRDKQSGKTILDFLKSDGFANRNFMQLIHDDSLTFKEDIQKAQVSGQGDSLHEHIANLAGSPAIKKGILQTVKVVDELVKVMGRHKPENIVIEMARENQTTQKGQKNSRERMKRIEEGIKELGSQILKEHPVENTQLQNEKLYLYYLQNGRDMYVDQELDINRLSDYDVDHIVPQSFLKDDSIDNKVLTRSDKARGKSDNVPSEEVVKKMKNYWRQLLNAKLITQRKFDNLTKAERGGLSELDKAGFIKRQLVETRQITKHVAQILDSRMNTKYDENDKLIREVKVITLKSKLVSDFRKDFQFYKVREINNYHHAHDAYLNAVVGTALIKKYPKLESEFVYGDYKVYDVRKMIAKSEQEIGKATAKYFFYSNIMNFFKTEITLANGEIRKRPLIETNGETGEIVWDKGRDFATVRKVLSMPQVNIVKKTEVQTGGFSKESILPKRNSDKLIARKKDWDPKKYGGFDSPTVAYSVLVVAKVEKGKSKKLKSVKELLGITIMERSSFEKNPIDFLEAKGYKEVKKDLIIKLPKYSLFELENGRKRMLASAGELQKGNELALPSKYVNFLYLASHYEKLKGSPEDNEQKQLFVEQHKHYLDEIIEQISEFSKRVILADANLDKVLSAYNKHRDKPIREQAENIIHLFTLTNLGAPAAFKYFDTTIDRKRYTSTKEVLDATLIHQSITGLYETRIDLSQLGGDGGPAPGGSEAAAKGGTLNIEDEYRLHETSKEPDVPLGSTWLSDFPQAWAETGGMGLAVRQAPLIIPLKATSTPVSIKQYPMSQEARLGIKPHIQRLLDQGILVPCQSPWNTPLLPVKKPGTNDYRPVQDLREVNKRVEDIHPTVPNPYNLLSGLPPSHQWYTVLDLKDAFFCLRLHPTSQPLFAFEWRDPEMGISGQLTWTRLPQGFKNSPTLFDEALHRDLADFRIQHPDLILLQYVDDLLLAATSEQDCQRGTRALLQTLGNLGYRASAKKAQICQKQVKYLGYLLKEGQRWLTEARKETVMGQPTPKTPRQLREFLGTAGFCRLWIPGFAEMAAPLYPLTKTGTLFNWGPDQQKAYQEIKQALLTAPALGLPDLTKPFELFVDEKQGYAKGVLTQKLGPWRRPVAYLSKKLDPVAAGWPPCLRMVAAIAVLTKDAGKLTMGQPLVILAPHAVEALVKQPPDRWLSNARMTHYQAMLLDTDRVQFGPVVALNPATLLPLPEKEAPHDCLEILAETHGTRPDLTDQPIPDADYTWYTDGSSFLQEGQRRAGAAVTTETEVIWARALPAGTSAQRAELIALTQALKMAEGKKLNVYTDSRYAFATAHVHGEIYRRRGLLTSEGREIKNKNEILALLKALFLPKRLSIIHCPGHQKGNSAEARGNRMADQAAREAAMKAVLETSTLLAGKRTADGSEFEKRTADGSEFESPKKKAKVE

SEQ ID NO: 7252 - protein, 2096 aa, synthetic construct
MPAAKRVKLDGGDKKYSIGLDIGTNSVGWAVITDEYKVPSKKFKVLGNTDRHSIKKNLIGALLFDSGETAEATRLKRTARRRYTRRKNRICYLQEIFSNEMAKVDDSFFHRLEESFLVEEDKKHERHPIFGNIVDEVAYHEKYPTIYHLRKKLVDSTDKADLRLIYLALAHMIKFRGHFLIEGDLNPDNSDVDKLFIQLVQTYNQLFEENPINASGVDAKAILSARLSKSRRLENLIAQLPGEKKNGLFGNLIALSLGLTPNFKSNFDLAEDAKLQLSKDTYDDDLDNLLAQIGDQYADLFLAAKNLSDAILLSDILRVNTEITKAPLSASMIKRYDEHHQDLTLLKALVRQQLPEKYKEIFFDQSKNGYAGYIDGGASQEEFYKFIKPILEKMDGTEELLVKLNREDLLRKQRTFDNGSIPHQIHLGELHAILRRQEDFYPFLKDNREKIEKILTFRIPYYVGPLARGNSRFAWMTRKSEETITPWNFEEVVDKGASAQSFIERMTNFDKNLPNEKVLPKHSLLYEYFTVYNELTKVKYVTEGMRKPAFLSGEQKKAIVDLLFKTNRKVTVKQLKEDYFKKIECFDSVEISGVEDRFNASLGTYHDLLKIIKDKDFLDNEENEDILEDIVLTLTLFEDREMIEERLKTYAHLFDDKVMKQLKRRRYTGWGRLSRKLINGIRDKQSGKTILDFLKSDGFANRNFMQLIHDDSLTFKEDIQKAQVSGQGDSLHEHIANLAGSPAIKKGILQTVKVVDELVKVMGRHKPENIVIEMARENQTTQKGQKNSRERMKRIEEGIKELGSQILKEHPVENTQLQNEKLYLYYLQNGRDMYVDQELDINRLSDYDVDHIVPQSFLKDDSIDNKVLTRSDKARGKSDNVPSEEVVKKMKNYWRQLLNAKLITQRKFDNLTKAERGGLSELDKAGFIKRQLVETRQITKHVAQILDSRMNTKYDENDKLIREVKVITLKSKLVSDFRKDFQFYKVREINNYHHAHDAYLNAVVGTALIKKYPKLESEFVYGDYKVYDVRKMIAKSEQEIGKATAKYFFYSNIMNFFKTEITLANGEIRKRPLIETNGETGEIVWDKGRDFATVRKVLSMPQVNIVKKTEVQTGGFSKESILPKRNSDKLIARKKDWDPKKYGGFDSPTVAYSVLVVAKVEKGKSKKLKSVKELLGITIMERSSFEKNPIDFLEAKGYKEVKKDLIIKLPKYSLFELENGRKRMLASAGELQKGNELALPSKYVNFLYLASHYEKLKGSPEDNEQKQLFVEQHKHYLDEIIEQISEFSKRVILADANLDKVLSAYNKHRDKPIREQAENIIHLFTLTNLGAPAAFKYFDTTIDRKRYTSTKEVLDATLIHQSITGLYETRIDLSQLGGDGGPAPGGSEAAAKGGTLNIEDEYRLHETSKEPDVPLGSTWLSDFPQAWAETGGMGLAVRQAPLIIPLKATSTPVSIKQYPMSQEARLGIKPHIQRLLDQGILVPCQSPWNTPLLPVKKPGTNDYRPVQDLREVNKRVEDIHPTVPNPYNLLSGLPPSHQWYTVLDLKDAFFCLRLHPTSQPLFAFEWRDPEMGISGQLTWTRLPQGFKNSPTLFNEALHRDLADFRIQHPDLILLQYVDDLLLAATSEQDCQRGTRALLQTLGNLGYRASAKKAQICQKQVKYLGYLLKEGQRWLTEARKETVMGQPTPKTPRQLREFLGTAGFCRLWIPGFAEMAAPLYPLTKPGTLFNWGPDQQKAYQEIKQALLTAPALGLPDLTKPFELFVDEKQGYAKGVLTQKLGPWRRPVAYLSKKLDPVAAGWPPCLRMVAAIAVLTKDAGKLTMGQPLVILAPHAVEALVKQPPDRWLSNARMTHYQAMLLDTDRVQFGPVVALNPATLLPLPEKEAPHDCLEILAETHGTRPDLTDQPIPDADYTWYTDGSSFLQEGQRRAGAAVTTETEVIWARALPAGTSAQRAELIALTQALKMAEGKKLNVYTDSRYAFATAHVHGEIYRRRGWLTSEGREIKNKNEILALLKALFLPKRLSIIHCPGHQKGNSAEARGNRMADQAAREAAMKAVLETSTLLAGKRTADGSEFEKRTADGSEFESPKKKAKVE

SEQ ID NO: 7253 - protein, 2098 aa, synthetic construct
MPAAKRVKLDGGDKKYSIGLDIGTNSVGWAVITDEYKVPSKKFKVLGNTDRHSIKKNLIGALLFDSGETAEATRLKRTARRRYTRRKNRICYLQEIFSNEMAKVDDSFFHRLEESFLVEEDKKHERHPIFGNIVDEVAYHEKYPTIYHLRKKLVDSTDKADLRLIYLALAHMIKFRGHFLIEGDLNPDNSDVDKLFIQLVQTYNQLFEENPINASGVDAKAILSARLSKSRRLENLIAQLPGEKKNGLFGNLIALSLGLTPNFKSNFDLAEDAKLQLSKDTYDDDLDNLLAQIGDQYADLFLAAKNLSDAILLSDILRVNTEITKAPLSASMIKRYDEHHQDLTLLKALVRQQLPEKYKEIFFDQSKNGYAGYIDGGASQEEFYKFIKPILEKMDGTEELLVKLNREDLLRKQRTFDNGSIPHQIHLGELHAILRRQEDFYPFLKDNREKIEKILTFRIPYYVGPLARGNSRFAWMTRKSEETITPWNFEEVVDKGASAQSFIERMTNFDKNLPNEKVLPKHSLLYEYFTVYNELTKVKYVTEGMRKPAFLSGEQKKAIVDLLFKTNRKVTVKQLKEDYFKKIECFDSVEISGVEDRFNASLGTYHDLLKIIKDKDFLDNEENEDILEDIVLTLTLFEDREMIEERLKTYAHLFDDKVMKQLKRRRYTGWGRLSRKLINGIRDKQSGKTILDFLKSDGFANRNFMQLIHDDSLTFKEDIQKAQVSGQGDSLHEHIANLAGSPAIKKGILQTVKVVDELVKVMGRHKPENIVIEMARENQTTQKGQKNSRERMKRIEEGIKELGSQILKEHPVENTQLQNEKLYLYYLQNGRDMYVDQELDINRLSDYDVDHIVPQSFLKDDSIDNKVLTRSDKARGKSDNVPSEEVVKKMKNYWRQLLNAKLITQRKFDNLTKAERGGLSELDKAGFIKRQLVETRQITKHVAQILDSRMNTKYDENDKLIREVKVITLKSKLVSDFRKDFQFYKVREINNYHHAHDAYLNAVVGTALIKKYPKLESEFVYGDYKVYDVRKMIAKSEQEIGKATAKYFFYSNIMNFFKTEITLANGEIRKRPLIETNGETGEIVWDKGRDFATVRKVLSMPQVNIVKKTEVQTGGFSKESILPKRNSDKLIARKKDWDPKKYGGFDSPTVAYSVLVVAKVEKGKSKKLKSVKELLGITIMERSSFEKNPIDFLEAKGYKEVKKDLIIKLPKYSLFELENGRKRMLASAGELQKGNELALPSKYVNFLYLASHYEKLKGSPEDNEQKQLFVEQHKHYLDEIIEQISEFSKRVILADANLDKVLSAYNKHRDKPIREQAENIIHLFTLTNLGAPAAFKYFDTTIDRKRYTSTKEVLDATLIHQSITGLYETRIDLSQLGGDGGPAPEAAAKGGSGGTAPLEEEYRLFLEAPIQNVTLLEQWKREIPKVWAEINPPGLASTQAPIHVQLLSTALPVRVRQYPITLEAKRSLRETIRKFRAAGILRPVHSPWNTPLLPVRKSGTSEYRMVQDLREVNKRVETIHPTVPNPYTLLSLLPPDRIWYSVLDLKDAFFCIPLAPESQLIFAFEWADAEEGESGQLTWTRLPQGFKNSPTLFDEALNRDLQGFRLDHPSVSLLQYVDDLLIAADTQAACLSATRDLLMTLAELGYRVSGKKAQLCQEEVTYLGFKIHKGSRSLSNSRTQAILQIPVPKTKRQVREFLGTIGYCRLWIPGFAELAQPLYAATRGGNDPLVWGEKEEEAFQSLKLALTQPPALALPSLDKPFQLFVEETSGAAKGVLTQALGPWKRPVAYLSKRLDPVAAGWPRCLRAIAAAALLTREASKLTFGQDIEITSSHNLESLLRSPPDKWLTNARITQYQVLLLDPPRVRFKQTAALNPATLLPETDDTLPIHHCLDTLDSLTSTRPDLTDQPLAQAEATLFTDGSSYIRDGKRYAGAAVVTLDSVIWAEPLPIGTSAQKAELIALTKALEWSKDKSVNIYTDSRYAFATLHVHGMIYRERGLLTAGGKAIKNAPEILALLTAVWLPKRVAVMHCKGHQKDDAPTSTGNRRADEVAREVAIRPLSTQATISAGKRTADGSEFEKRTADGSEFESPKKKAKVE

SEQ ID NO: 7254 - protein, 2173 aa, synthetic construct
MPAAKRVKLDGGDKKYSIGLDIGTNSVGWAVITDEYKVPSKKFKVLGNTDRHSIKKNLIGALLFDSGETAEATRLKRTARRRYTRRKNRICYLQEIFSNEMAKVDDSFFHRLEESFLVEEDKKHERHPIFGNIVDEVAYHEKYPTIYHLRKKLVDSTDKADLRLIYLALAHMIKFRGHFLIEGDLNPDNSDVDKLFIQLVQTYNQLFEENPINASGVDAKAILSARLSKSRRLENLIAQLPGEKKNGLFGNLIALSLGLTPNFKSNFDLAEDAKLQLSKDTYDDDLDNLLAQIGDQYADLFLAAKNLSDAILLSDILRVNTEITKAPLSASMIKRYDEHHQDLTLLKALVRQQLPEKYKEIFFDQSKNGYAGYIDGGASQEEFYKFIKPILEKMDGTEELLVKLNREDLLRKQRTFDNGSIPHQIHLGELHAILRRQEDFYPFLKDNREKIEKILTFRIPYYVGPLARGNSRFAWMTRKSEETITPWNFEEVVDKGASAQSFIERMTNFDKNLPNEKVLPKHSLLYEYFTVYNELTKVKYVTEGMRKPAFLSGEQKKAIVDLLFKTNRKVTVKQLKEDYFKKIECFDSVEISGVEDRFNASLGTYHDLLKIIKDKDFLDNEENEDILEDIVLTLTLFEDREMIEERLKTYAHLFDDKVMKQLKRRRYTGWGRLSRKLINGIRDKQSGKTILDFLKSDGFANRNFMQLIHDDSLTFKEDIQKAQVSGQGDSLHEHIANLAGSPAIKKGILQTVKVVDELVKVMGRHKPENIVIEMARENQTTQKGQKNSRERMKRIEEGIKELGSQILKEHPVENTQLQNEKLYLYYLQNGRDMYVDQELDINRLSDYDVDHIVPQSFLKDDSIDNKVLTRSDKARGKSDNVPSEEVVKKMKNYWRQLLNAKLITQRKFDNLTKAERGGLSELDKAGFIKRQLVETRQITKHVAQILDSRMNTKYDENDKLIREVKVITLKSKLVSDFRKDFQFYKVREINNYHHAHDAYLNAVVGTALIKKYPKLESEFVYGDYKVYDVRKMIAKSEQEIGKATAKYFFYSNIMNFFKTEITLANGEIRKRPLIETNGETGEIVWDKGRDFATVRKVLSMPQVNIVKKTEVQTGGFSKESILPKRNSDKLIARKKDWDPKKYGGFDSPTVAYSVLVVAKVEKGKSKKLKSVKELLGITIMERSSFEKNPIDFLEAKGYKEVKKDLIIKLPKYSLFELENGRKRMLASAGELQKGNELALPSKYVNFLYLASHYEKLKGSPEDNEQKQLFVEQHKHYLDEIIEQISEFSKRVILADANLDKVLSAYNKHRDKPIREQAENIIHLFTLTNLGAPAAFKYFDTTIDRKRYTSTKEVLDATLIHQSITGLYETRIDLSQLGGDGGPAPEAAAKGGSGGMDLLKPLTVERKGVKIKGYWNSQADITCVPKDLLQGEEPVRQQNVTTIHGTQEGDVYYVNLKIDGRRINTEVIGTTLDYAIITPGDVPWILKKPLELTIKLDLEEQQGTLLNNSILSKKGKEELKQLFEKYSALWQSWENQVGHRRIRPHKIATGTVKPTPQKQYHINPKAKPDIQIVINDLLKQGVLIQKESTMNTPVYPVPKPNGRWRMVLDYRAVNKVTPLIAVQNQHSYGILGSLFKGRYKTTIDLSNGFWAHPIVPEDYWITAFTWQGKQYCWTVLPQGFLNSPGLFTGDVVDLLQGIPNVEVYVDDVYISHDSEKEHLEYLDILFNRLKEAGYIISLKKSNIANSIVDFLGFQITNEGRGLTDTFKEKLENITAPTTLKQLQSILGLLNFARNFIPDFTELIAPLYALIPKSTKNYVPWQIEHSTTLETLITKLNGAEYLQGRKGDKTLIMKVNASYTTGYIRYYNEGEKKPISYVSIVFSKTELKFTELEKLLTTVHKGLLKALDLSMGQNIHVYSPIVSMQNIQKTPQTAKKALASRWLSWLSYLEDPRIRFFYDPQMPALKDLPAVDTGKDNKKHPSNFQHIFYTDGSAITSPTKEGHLNAGMGIVYFINKDGNLQKQQEWSISLGNHTAQFAEIAAFEFALKKCLPLGGNILVVTDSNYVAKAYNEELDVWASNGFVNNRKKPLKHISKWKSVADLKRLRPDVVVTHEPGHQKLDSSPHAYGNNLADQLATQASFKVHAGKRTADGSEFEKRTADGSEFESPKKKAKVE

SEQ ID NO: 7255 - protein, 2087 aa, synthetic construct
MPAAKRVKLDGGDKKYSIGLDIGTNSVGWAVITDEYKVPSKKFKVLGNTDRHSIKKNLIGALLFDSGETAEATRLKRTARRRYTRRKNRICYLQEIFSNEMAKVDDSFFHRLEESFLVEEDKKHERHPIFGNIVDEVAYHEKYPTIYHLRKKLVDSTDKADLRLIYLALAHMIKFRGHFLIEGDLNPDNSDVDKLFIQLVQTYNQLFEENPINASGVDAKAILSARLSKSRRLENLIAQLPGEKKNGLFGNLIALSLGLTPNFKSNFDLAEDAKLQLSKDTYDDDLDNLLAQIGDQYADLFLAAKNLSDAILLSDILRVNTEITKAPLSASMIKRYDEHHQDLTLLKALVRQQLPEKYKEIFFDQSKNGYAGYIDGGASQEEFYKFIKPILEKMDGTEELLVKLNREDLLRKQRTFDNGSIPHQIHLGELHAILRRQEDFYPFLKDNREKIEKILTFRIPYYVGPLARGNSRFAWMTRKSEETITPWNFEEVVDKGASAQSFIERMTNFDKNLPNEKVLPKHSLLYEYFTVYNELTKVKYVTEGMRKPAFLSGEQKKAIVDLLFKTNRKVTVKQLKEDYFKKIECFDSVEISGVEDRFNASLGTYHDLLKIIKDKDFLDNEENEDILEDIVLTLTLFEDREMIEERLKTYAHLFDDKVMKQLKRRRYTGWGRLSRKLINGIRDKQSGKTILDFLKSDGFANRNFMQLIHDDSLTFKEDIQKAQVSGQGDSLHEHIANLAGSPAIKKGILQTVKVVDELVKVMGRHKPENIVIEMARENQTTQKGQKNSRERMKRIEEGIKELGSQILKEHPVENTQLQNEKLYLYYLQNGRDMYVDQELDINRLSDYDVDHIVPQSFLKDDSIDNKVLTRSDKARGKSDNVPSEEVVKKMKNYWRQLLNAKLITQRKFDNLTKAERGGLSELDKAGFIKRQLVETRQITKHVAQILDSRMNTKYDENDKLIREVKVITLKSKLVSDFRKDFQFYKVREINNYHHAHDAYLNAVVGTALIKKYPKLESEFVYGDYKVYDVRKMIAKSEQEIGKATAKYFFYSNIMNFFKTEITLANGEIRKRPLIETNGETGEIVWDKGRDFATVRKVLSMPQVNIVKKTEVQTGGFSKESILPKRNSDKLIARKKDWDPKKYGGFDSPTVAYSVLVVAKVEKGKSKKLKSVKELLGITIMERSSFEKNPIDFLEAKGYKEVKKDLIIKLPKYSLFELENGRKRMLASAGELQKGNELALPSKYVNFLYLASHYEKLKGSPEDNEQKQLFVEQHKHYLDEIIEQISEFSKRVILADANLDKVLSAYNKHRDKPIREQAENIIHLFTLTNLGAPAAFKYFDTTIDRKRYTSTKEVLDATLIHQSITGLYETRIDLSQLGGDGGPAPEAAAKGGSGGVPWILKKPLELTIKLDLEEQQGTLLNNSILSKKGKEELKQLFEKYSALWQSWENQVGHRRIRPHKIATGTVKPTPQKQYHINPKAKPDIQIVINDLLKQGVLIQKESTMNTPVYPVPKPNGRWRMVLDYRAVNKVTPLIAVQNQHSYGILGSLFKGRYKTTIDLSNGFWAHPIVPEDYWITAFTWQGKQYCWTVLPQGFLNSPGLFTGDVVDLLQGIPNVEVYVDDVYISHDSEKEHLEYLDILFNRLKEAGYIISLKKSNIANSIVDFLGFQITNEGRGLTDTFKEKLENITAPTTLKQLQSILGLLNFARNFIPDFTELIAPLYALIPKSTKNYVPWQIEHSTTLETLITKLNGAEYLQGRKGDKTLIMKVNASYTTGYIRYYNEGEKKPISYVSIVFSKTELKFTELEKLLTTVHKGLLKALDLSMGQNIHVYSPIVSMQNIQKTPQTAKKALASRWLSWLSYLEDPRIRFFYDPQMPALKDLPAVDTGKDNKKHPSNFQHIFYTDGSAITSPTKEGHLNAGMGIVYFINKDGNLQKQQEWSISLGNHTAQFAEIAAFEFALKKCLPLGGNILVVTDSNYVAKAYNEELDVWASNGFVNNRKKPLKHISKWKSVADLKRLRPDVVVTHEPGHQKLDSSPHAYGNNLADQLATQASFKVHAGKRTADGSEFEKRTADGSEFESPKKKAKVE

SEQ ID NO: 7256 - protein, 2095 aa, synthetic construct
MPAAKRVKLDGGDKKYSIGLDIGTNSVGWAVITDEYKVPSKKFKVLGNTDRHSIKKNLIGALLFDSGETAEATRLKRTARRRYTRRKNRICYLQEIFSNEMAKVDDSFFHRLEESFLVEEDKKHERHPIFGNIVDEVAYHEKYPTIYHLRKKLVDSTDKADLRLIYLALAHMIKFRGHFLIEGDLNPDNSDVDKLFIQLVQTYNQLFEENPINASGVDAKAILSARLSKSRRLENLIAQLPGEKKNGLFGNLIALSLGLTPNFKSNFDLAEDAKLQLSKDTYDDDLDNLLAQIGDQYADLFLAAKNLSDAILLSDILRVNTEITKAPLSASMIKRYDEHHQDLTLLKALVRQQLPEKYKEIFFDQSKNGYAGYIDGGASQEEFYKFIKPILEKMDGTEELLVKLNREDLLRKQRTFDNGSIPHQIHLGELHAILRRQEDFYPFLKDNREKIEKILTFRIPYYVGPLARGNSRFAWMTRKSEETITPWNFEEVVDKGASAQSFIERMTNFDKNLPNEKVLPKHSLLYEYFTVYNELTKVKYVTEGMRKPAFLSGEQKKAIVDLLFKTNRKVTVKQLKEDYFKKIECFDSVEISGVEDRFNASLGTYHDLLKIIKDKDFLDNEENEDILEDIVLTLTLFEDREMIEERLKTYAHLFDDKVMKQLKRRRYTGWGRLSRKLINGIRDKQSGKTILDFLKSDGFANRNFMQLIHDDSLTFKEDIQKAQVSGQGDSLHEHIANLAGSPAIKKGILQTVKVVDELVKVMGRHKPENIVIEMARENQTTQKGQKNSRERMKRIEEGIKELGSQILKEHPVENTQLQNEKLYLYYLQNGRDMYVDQELDINRLSDYDVDHIVPQSFLKDDSIDNKVLTRSDKARGKSDNVPSEEVVKKMKNYWRQLLNAKLITQRKFDNLTKAERGGLSELDKAGFIKRQLVETRQITKHVAQILDSRMNTKYDENDKLIREVKVITLKSKLVSDFRKDFQFYKVREINNYHHAHDAYLNAVVGTALIKKYPKLESEFVYGDYKVYDVRKMIAKSEQEIGKATAKYFFYSNIMNFFKTEITLANGEIRKRPLIETNGETGEIVWDKGRDFATVRKVLSMPQVNIVKKTEVQTGGFSKESILPKRNSDKLIARKKDWDPKKYGGFDSPTVAYSVLVVAKVEKGKSKKLKSVKELLGITIMERSSFEKNPIDFLEAKGYKEVKKDLIIKLPKYSLFELENGRKRMLASAGELQKGNELALPSKYVNFLYLASHYEKLKGSPEDNEQKQLFVEQHKHYLDEIIEQISEFSKRVILADANLDKVLSAYNKHRDKPIREQAENIIHLFTLTNLGAPAAFKYFDTTIDRKRYTSTKEVLDATLIHQSITGLYETRIDLSQLGGDGGPAPEAAAKGGSGGTLQLEEEYRLFEPESTQKQEMDIWLKNFPQAWAETGGMGTAHCQAPVLIQLKATATPISIRQYPMPHEAYQGIKPHIRRMLDQGILKPCQSPWNTPLLPVKKPGTEDYRPVQDLREVNKRVEDIHPTVPNPYNLLSTLPPSHPWYTVLDLKDAFFCLRLHSESQLLFAFEWRDPEIGLSGQLTWTRLPQGFKNSPTLFNEALHSDLADFRVRYPALVLLQYVDDLLLAAATRTECLEGTKALLETLGNKGYRASAKKAQICLQEVTYLGYSLKDGQRWLTKARKEAILSIPVPKNSRQVREFLGTAGYCRLWIPGFAELAAPLYPLTRPGTLFQWGTEQQLAFEDIKKALLSSPALGLPDITKPFELFIDENSGFAKGVLVQKLGPWKRPVAYLSKKLDTVASGWPPCLRMVAAIAILVKDAGKLTLGQPLTILTSHPVEALVRQPPNKWLSNARMTHYQAMLLDAERVHFGPTVSLNPATLLPLPSGGNHHDCLQILAETHGTRPDLTDQPLPDADLTWYTDGSSFIRNGEREAGAAVTTESEVIWAAPLPPGTSAQRAELIALTQALKMAEGKKLTVYTDSRYAFATTHVHGEIYRRRGWLTSEGKEIKNKNEILALLEALFLPKRLSIIHCPGHQKGDSPQAKGNRLADDTAKKAATETHSSLTVLPAGKRTADGSEFEKRTADGSEFESPKKKAKVE

SEQ ID NO: 7257 - protein, 2094 aa, synthetic construct
MPAAKRVKLDGGDKKYSIGLDIGTNSVGWAVITDEYKVPSKKFKVLGNTDRHSIKKNLIGALLFDSGETAEATRLKRTARRRYTRRKNRICYLQEIFSNEMAKVDDSFFHRLEESFLVEEDKKHERHPIFGNIVDEVAYHEKYPTIYHLRKKLVDSTDKADLRLIYLALAHMIKFRGHFLIEGDLNPDNSDVDKLFIQLVQTYNQLFEENPINASGVDAKAILSARLSKSRRLENLIAQLPGEKKNGLFGNLIALSLGLTPNFKSNFDLAEDAKLQLSKDTYDDDLDNLLAQIGDQYADLFLAAKNLSDAILLSDILRVNTEITKAPLSASMIKRYDEHHQDLTLLKALVRQQLPEKYKEIFFDQSKNGYAGYIDGGASQEEFYKFIKPILEKMDGTEELLVKLNREDLLRKQRTFDNGSIPHQIHLGELHAILRRQEDFYPFLKDNREKIEKILTFRIPYYVGPLARGNSRFAWMTRKSEETITPWNFEEVVDKGASAQSFIERMTNFDKNLPNEKVLPKHSLLYEYFTVYNELTKVKYVTEGMRKPAFLSGEQKKAIVDLLFKTNRKVTVKQLKEDYFKKIECFDSVEISGVEDRFNASLGTYHDLLKIIKDKDFLDNEENEDILEDIVLTLTLFEDREMIEERLKTYAHLFDDKVMKQLKRRRYTGWGRLSRKLINGIRDKQSGKTILDFLKSDGFANRNFMQLIHDDSLTFKEDIQKAQVSGQGDSLHEHIANLAGSPAIKKGILQTVKVVDELVKVMGRHKPENIVIEMARENQTTQKGQKNSRERMKRIEEGIKELGSQILKEHPVENTQLQNEKLYLYYLQNGRDMYVDQELDINRLSDYDVDHIVPQSFLKDDSIDNKVLTRSDKARGKSDNVPSEEVVKKMKNYWRQLLNAKLITQRKFDNLTKAERGGLSELDKAGFIKRQLVETRQITKHVAQILDSRMNTKYDENDKLIREVKVITLKSKLVSDFRKDFQFYKVREINNYHHAHDAYLNAVVGTALIKKYPKLESEFVYGDYKVYDVRKMIAKSEQEIGKATAKYFFYSNIMNFFKTEITLANGEIRKRPLIETNGETGEIVWDKGRDFATVRKVLSMPQVNIVKKTEVQTGGFSKESILPKRNSDKLIARKKDWDPKKYGGFDSPTVAYSVLVVAKVEKGKSKKLKSVKELLGITIMERSSFEKNPIDFLEAKGYKEVKKDLIIKLPKYSLFELENGRKRMLASAGELQKGNELALPSKYVNFLYLASHYEKLKGSPEDNEQKQLFVEQHKHYLDEIIEQISEFSKRVILADANLDKVLSAYNKHRDKPIREQAENIIHLFTLTNLGAPAAFKYFDTTIDRKRYTSTKEVLDATLIHQSITGLYETRIDLSQLGGDGGPAPEAAAKGGSGGVLNLEEEYRLHEKPVPSSIDPSWLQLFPTVWAERAGMGLANQVPPVVVELRSGASPVAVRQYPMSKEAREGIRPHIQKFLDLGVLVPCRSPWNTPLLPVKKPGTNDYRPVQDLREINKRVQDIHPTVPNPYNLLSSLPPSYTWYSVLDLKDAFFCLRLHPNSQPLFAFEWKDPEKGNTGQLTWTRLPQGFKNSPTLFNEALHRDLAPFRALNPQVVLLQYVDDLLVAAPTYEDCKKGTQKLLQELSKLGYRVSAKKAQLCQREVTYLGYLLKEGKRWLTPARKATVMKIPVPTTPRQVREFLGKAGFCRLFIPGFASLAAPLYPLTKPSIPFIWTEEHQQAFDHIKKALLSAPALALPDLTKPFTLYIDERAGVARGVLTQTLGPWRRPVAYLSKKLDPVASGWPTCLKAVAAVALLLKDADKLTLGQNVTVIASHSLESIVRQPPDRWMTNARMTHYQSLLLNERVSFAPPAVLNPATLLPVESEATPVHRCSEILAEETGTRRDLEDQPLPGVPTWYTDGSSFITEGKRRAGAPIVDGKRTVWASSLPEGTSAQKAELVALTQALRLAEGKNINIYTDSRYAFATAHIHGAIYKQRGWLTSAGKDIKNKEEILALLEAIHLPRRVAIIHCPGHQRGSNPVATGNRRADEAAKQAALSTRVLAGTTKPAGKRTADGSEFEKRTADGSEFESPKKKAKVE

SEQ ID NO: 7258 - protein, 2127 aa, synthetic construct
MPAAKRVKLDGGDKKYSIGLDIGTNSVGWAVITDEYKVPSKKFKVLGNTDRHSIKKNLIGALLFDSGETAEATRLKRTARRRYTRRKNRICYLQEIFSNEMAKVDDSFFHRLEESFLVEEDKKHERHPIFGNIVDEVAYHEKYPTIYHLRKKLVDSTDKADLRLIYLALAHMIKFRGHFLIEGDLNPDNSDVDKLFIQLVQTYNQLFEENPINASGVDAKAILSARLSKSRRLENLIAQLPGEKKNGLFGNLIALSLGLTPNFKSNFDLAEDAKLQLSKDTYDDDLDNLLAQIGDQYADLFLAAKNLSDAILLSDILRVNTEITKAPLSASMIKRYDEHHQDLTLLKALVRQQLPEKYKEIFFDQSKNGYAGYIDGGASQEEFYKFIKPILEKMDGTEELLVKLNREDLLRKQRTFDNGSIPHQIHLGELHAILRRQEDFYPFLKDNREKIEKILTFRIPYYVGPLARGNSRFAWMTRKSEETITPWNFEEVVDKGASAQSFIERMTNFDKNLPNEKVLPKHSLLYEYFTVYNELTKVKYVTEGMRKPAFLSGEQKKAIVDLLFKTNRKVTVKQLKEDYFKKIECFDSVEISGVEDRFNASLGTYHDLLKIIKDKDFLDNEENEDILEDIVLTLTLFEDREMIEERLKTYAHLFDDKVMKQLKRRRYTGWGRLSRKLINGIRDKQSGKTILDFLKSDGFANRNFMQLIHDDSLTFKEDIQKAQVSGQGDSLHEHIANLAGSPAIKKGILQTVKVVDELVKVMGRHKPENIVIEMARENQTTQKGQKNSRERMKRIEEGIKELGSQILKEHPVENTQLQNEKLYLYYLQNGRDMYVDQELDINRLSDYDVDHIVPQSFLKDDSIDNKVLTRSDKARGKSDNVPSEEVVKKMKNYWRQLLNAKLITQRKFDNLTKAERGGLSELDKAGFIKRQLVETRQITKHVAQILDSRMNTKYDENDKLIREVKVITLKSKLVSDFRKDFQFYKVREINNYHHAHDAYLNAVVGTALIKKYPKLESEFVYGDYKVYDVRKMIAKSEQEIGKATAKYFFYSNIMNFFKTEITLANGEIRKRPLIETNGETGEIVWDKGRDFATVRKVLSMPQVNIVKKTEVQTGGFSKESILPKRNSDKLIARKKDWDPKKYGGFDSPTVAYSVLVVAKVEKGKSKKLKSVKELLGITIMERSSFEKNPIDFLEAKGYKEVKKDLIIKLPKYSLFELENGRKRMLASAGELQKGNELALPSKYVNFLYLASHYEKLKGSPEDNEQKQLFVEQHKHYLDEIIEQISEFSKRVILADANLDKVLSAYNKHRDKPIREQAENIIHLFTLTNLGAPAAFKYFDTTIDRKRYTSTKEVLDATLIHQSITGLYETRIDLSQLGGDGGPAPEAAAKGGSGGLLGRDLLTKLKAQIQFSTEGPQVTWEDRPAMCLVLNLEEEYRLHEKPVPPSIDPSWLQLFPMVWAEKAGMGLANQVPPVVVELKSDASPVAVRQYPMSKEAREGIRPHIQRFLDLGILVPCQSPWNTPLLPVKKPGTNDYRPVQDLREVNKRVQDIHPTVPNPYNLLSSLPPSHTWYSVLDLKDAFFCLKLHPNSQPLFAFEWRDPEKGNTGQLTWTRLPQGFKNSPTLFNEALHRDLASFRALNPQVVMLQYVDDLLVAAPTYRDCKEGTRRLLQELSKLGYRVSAKKAQLCREEVTYLGYLLKGGKRWLTPARKATVMKIPTPTTPRQVREFLGKAGFCRLFIPGFASLAAPLYPLTRPKVPFTWTEAHQEAFGRIKEALLSAPALALPDLTKPFALYVDEKEGVARGVLTQTLGPWRRPVAYLSKKLDPVASGWPTCLKAIAAVALLLKDADKLTLGQNVLVIAPHNLESIVRQPPDRWMTNARMTHYQSLLLNERVSFAPPAILNPATLLPVESDDTPIHICSEILAEETGTRPDLRDQPLPGVPAWYTDGSSFIMDGRRQAGAAIVDNKRTVWASNLPEGTSAQKAELIALTQALRLAEGKSINIYTDSRYAFATAHVHGAIYKQRGWLTSAGKDIKNKEEILALLEAIHLPKRVAIIHCPGHQRGTDPVATGNRKADEAAKQAAQSTRILTETTKNAGKRTADGSEFEKRTADGSEFESPKKKAKVE

SEQ ID NO: 7259 - protein, 2218 aa, synthetic construct
MPAAKRVKLDGGDKKYSIGLDIGTNSVGWAVITDEYKVPSKKFKVLGNTDRHSIKKNLIGALLFDSGETAEATRLKRTARRRYTRRKNRICYLQEIFSNEMAKVDDSFFHRLEESFLVEEDKKHERHPIFGNIVDEVAYHEKYPTIYHLRKKLVDSTDKADLRLIYLALAHMIKFRGHFLIEGDLNPDNSDVDKLFIQLVQTYNQLFEENPINASGVDAKAILSARLSKSRRLENLIAQLPGEKKNGLFGNLIALSLGLTPNFKSNFDLAEDAKLQLSKDTYDDDLDNLLAQIGDQYADLFLAAKNLSDAILLSDILRVNTEITKAPLSASMIKRYDEHHQDLTLLKALVRQQLPEKYKEIFFDQSKNGYAGYIDGGASQEEFYKFIKPILEKMDGTEELLVKLNREDLLRKQRTFDNGSIPHQIHLGELHAILRRQEDFYPFLKDNREKIEKILTFRIPYYVGPLARGNSRFAWMTRKSEETITPWNFEEVVDKGASAQSFIERMTNFDKNLPNEKVLPKHSLLYEYFTVYNELTKVKYVTEGMRKPAFLSGEQKKAIVDLLFKTNRKVTVKQLKEDYFKKIECFDSVEISGVEDRFNASLGTYHDLLKIIKDKDFLDNEENEDILEDIVLTLTLFEDREMIEERLKTYAHLFDDKVMKQLKRRRYTGWGRLSRKLINGIRDKQSGKTILDFLKSDGFANRNFMQLIHDDSLTFKEDIQKAQVSGQGDSLHEHIANLAGSPAIKKGILQTVKVVDELVKVMGRHKPENIVIEMARENQTTQKGQKNSRERMKRIEEGIKELGSQILKEHPVENTQLQNEKLYLYYLQNGRDMYVDQELDINRLSDYDVDHIVPQSFLKDDSIDNKVLTRSDKARGKSDNVPSEEVVKKMKNYWRQLLNAKLITQRKFDNLTKAERGGLSELDKAGFIKRQLVETRQITKHVAQILDSRMNTKYDENDKLIREVKVITLKSKLVSDFRKDFQFYKVREINNYHHAHDAYLNAVVGTALIKKYPKLESEFVYGDYKVYDVRKMIAKSEQEIGKATAKYFFYSNIMNFFKTEITLANGEIRKRPLIETNGETGEIVWDKGRDFATVRKVLSMPQVNIVKKTEVQTGGFSKESILPKRNSDKLIARKKDWDPKKYGGFDSPTVAYSVLVVAKVEKGKSKKLKSVKELLGITIMERSSFEKNPIDFLEAKGYKEVKKDLIIKLPKYSLFELENGRKRMLASAGELQKGNELALPSKYVNFLYLASHYEKLKGSPEDNEQKQLFVEQHKHYLDEIIEQISEFSKRVILADANLDKVLSAYNKHRDKPIREQAENIIHLFTLTNLGAPAAFKYFDTTIDRKRYTSTKEVLDATLIHQSITGLYETRIDLSQLGGDGGPAPEAAAKGGSGGTLGDQGSRGSDPLPEPRVTLTVEGIPTEFLVNTGAEHSVLTKPMGKMGSKRTVVAGATGSKVYPWTTKRLLKIGQKQVTHSFLVIPECPAPLLGRDLLTKLKAQIQFSTEGPQVTWEDRPAMCLVLNLEEEYRLHEKPVPPSIDPSWLQLFPMVWAEKAGMGLANQVPPVVVELKSDASPVAVRQYPMSKEAREGIRPHIQRFLDLGILVPCQSPWNTPLLPVKKPGTNDYRPVQDLREVNKRVQDIHPTVPNPYNLLSSLPPSHTWYSVLDLKDAFFCLKLHPNSQPLFAFEWRDPEKGNTGQLTWTRLPQGFKNSPTLFNEALHRDLASFRALNPQVVMLQYVDDLLVAAPTYRDCKEGTRRLLQELSKLGYRVSAKKAQLCREEVTYLGYLLKGGKRWLTPARKATVMKIPTPTTPRQVREFLGTAGFCRLWIPGFASLAAPLYPLTRPKVPFTWTEAHQEAFGRIKEALLSAPALALPDLTKPFALYVDEKEGVARGVLTQTLGPWRRPVAYLSKKLDPVASGWPTCLKAIAAVALLLKDADKLTLGQNVLVIAPHNLESIVRQPPDRWMTNARMTHYQSLLLNERVSFAPPAILNPATLLPVESDDTPIHICSEILAEETGTRPDLRDQPLPGVPAWYTDGSSFIMDGRRQAGAAIVDNKRTVWASNLPEGTSAQKAELIALTQALRLAEGKSINIYTDSRYAFATAHVHGAIYKQRGWLTSAGKDIKNKEEILALLEAIHLPKRVAIIHCPGHQRGTDPVATGNRKADEAAKQAAQSTRILTETTKNAGKRTADGSEFEKRTADGSEFESPKKKAKVE

SEQ ID NO: 7260 - protein, 2218 aa, synthetic construct
MPAAKRVKLDGGDKKYSIGLDIGTNSVGWAVITDEYKVPSKKFKVLGNTDRHSIKKNLIGALLFDSGETAEATRLKRTARRRYTRRKNRICYLQEIFSNEMAKVDDSFFHRLEESFLVEEDKKHERHPIFGNIVDEVAYHEKYPTIYHLRKKLVDSTDKADLRLIYLALAHMIKFRGHFLIEGDLNPDNSDVDKLFIQLVQTYNQLFEENPINASGVDAKAILSARLSKSRRLENLIAQLPGEKKNGLFGNLIALSLGLTPNFKSNFDLAEDAKLQLSKDTYDDDLDNLLAQIGDQYADLFLAAKNLSDAILLSDILRVNTEITKAPLSASMIKRYDEHHQDLTLLKALVRQQLPEKYKEIFFDQSKNGYAGYIDGGASQEEFYKFIKPILEKMDGTEELLVKLNREDLLRKQRTFDNGSIPHQIHLGELHAILRRQEDFYPFLKDNREKIEKILTFRIPYYVGPLARGNSRFAWMTRKSEETITPWNFEEVVDKGASAQSFIERMTNFDKNLPNEKVLPKHSLLYEYFTVYNELTKVKYVTEGMRKPAFLSGEQKKAIVDLLFKTNRKVTVKQLKEDYFKKIECFDSVEISGVEDRFNASLGTYHDLLKIIKDKDFLDNEENEDILEDIVLTLTLFEDREMIEERLKTYAHLFDDKVMKQLKRRRYTGWGRLSRKLINGIRDKQSGKTILDFLKSDGFANRNFMQLIHDDSLTFKEDIQKAQVSGQGDSLHEHIANLAGSPAIKKGILQTVKVVDELVKVMGRHKPENIVIEMARENQTTQKGQKNSRERMKRIEEGIKELGSQILKEHPVENTQLQNEKLYLYYLQNGRDMYVDQELDINRLSDYDVDHIVPQSFLKDDSIDNKVLTRSDKARGKSDNVPSEEVVKKMKNYWRQLLNAKLITQRKFDNLTKAERGGLSELDKAGFIKRQLVETRQITKHVAQILDSRMNTKYDENDKLIREVKVITLKSKLVSDFRKDFQFYKVREINNYHHAHDAYLNAVVGTALIKKYPKLESEFVYGDYKVYDVRKMIAKSEQEIGKATAKYFFYSNIMNFFKTEITLANGEIRKRPLIETNGETGEIVWDKGRDFATVRKVLSMPQVNIVKKTEVQTGGFSKESILPKRNSDKLIARKKDWDPKKYGGFDSPTVAYSVLVVAKVEKGKSKKLKSVKELLGITIMERSSFEKNPIDFLEAKGYKEVKKDLIIKLPKYSLFELENGRKRMLASAGELQKGNELALPSKYVNFLYLASHYEKLKGSPEDNEQKQLFVEQHKHYLDEIIEQISEFSKRVILADANLDKVLSAYNKHRDKPIREQAENIIHLFTLTNLGAPAAFKYFDTTIDRKRYTSTKEVLDATLIHQSITGLYETRIDLSQLGGDGGPAPEAAAKGGSGGTLGDQGSRGSDPLPEPRVTLTVEGIPTEFLVNTGAEHSVLTKPMGKMGSKRTVVAGATGSKVYPWTTKRLLKIGQKQVTHSFLVIPECPAPLLGRDLLTKLKAQIQFSTEGPQVTWEDRPAMCLVLNLEEEYRLHEKPVPPSIDPSWLQLFPMVWAEKAGMGLANQVPPVVVELKSDASPVAVRQYPMSKEAREGIRPHIQRFLDLGILVPCQSPWNTPLLPVKKPGTNDYRPVQDLREVNKRVQDIHPTVPNPYNLLSSLPPSHTWYSVLDLKDAFFCLKLHPNSQPLFAFEWRDPEKGNTGQLTWTRLPQGFKNSPTLFNEALHRDLASFRALNPQVVMLQYVDDLLVAAPTYRDCKEGTRRLLQELSKLGYRVSAKKAQLCREEVTYLGYLLKGGKRWLTPARKATVMKIPTPTTPRQVREFLGKAGFCRLFIPGFASLAAPLYPLTRPKVPFTWTEAHQEAFGRIKEALLSAPALALPDLTKPFALYVDEKEGVARGVLTQTLGPWRRPVAYLSKKLDPVASGWPTCLKAIAAVALLLKDADKLTLGQNVLVIAPHNLESIVRQPPDRWMTNARMTHYQSLLLNERVSFAPPAILNPATLLPVESDDTPIHICSEILAEETGTRPDLRDQPLPGVPAWYTDGSSFIMDGRRQAGAAIVDNKRTVWASNLPEGTSAQKAELIALTQALRLAEGKSINIYTDSRYAFATAHVHGAIYKQRGWLTSAGKDIKNKEEILALLEAIHLPKRVAIIHCPGHQRGTDPVATGNRKADEAAKQAAQSTRILTETTKNAGKRTADGSEFEKRTADGSEFESPKKKAKVE

SEQ ID NO: 7261 - protein, 2096 aa, synthetic construct
MPAAKRVKLDGGDKKYSIGLDIGTNSVGWAVITDEYKVPSKKFKVLGNTDRHSIKKNLIGALLFDSGETAEATRLKRTARRRYTRRKNRICYLQEIFSNEMAKVDDSFFHRLEESFLVEEDKKHERHPIFGNIVDEVAYHEKYPTIYHLRKKLVDSTDKADLRLIYLALAHMIKFRGHFLIEGDLNPDNSDVDKLFIQLVQTYNQLFEENPINASGVDAKAILSARLSKSRRLENLIAQLPGEKKNGLFGNLIALSLGLTPNFKSNFDLAEDAKLQLSKDTYDDDLDNLLAQIGDQYADLFLAAKNLSDAILLSDILRVNTEITKAPLSASMIKRYDEHHQDLTLLKALVRQQLPEKYKEIFFDQSKNGYAGYIDGGASQEEFYKFIKPILEKMDGTEELLVKLNREDLLRKQRTFDNGSIPHQIHLGELHAILRRQEDFYPFLKDNREKIEKILTFRIPYYVGPLARGNSRFAWMTRKSEETITPWNFEEVVDKGASAQSFIERMTNFDKNLPNEKVLPKHSLLYEYFTVYNELTKVKYVTEGMRKPAFLSGEQKKAIVDLLFKTNRKVTVKQLKEDYFKKIECFDSVEISGVEDRFNASLGTYHDLLKIIKDKDFLDNEENEDILEDIVLTLTLFEDREMIEERLKTYAHLFDDKVMKQLKRRRYTGWGRLSRKLINGIRDKQSGKTILDFLKSDGFANRNFMQLIHDDSLTFKEDIQKAQVSGQGDSLHEHIANLAGSPAIKKGILQTVKVVDELVKVMGRHKPENIVIEMARENQTTQKGQKNSRERMKRIEEGIKELGSQILKEHPVENTQLQNEKLYLYYLQNGRDMYVDQELDINRLSDYDVDHIVPQSFLKDDSIDNKVLTRSDKARGKSDNVPSEEVVKKMKNYWRQLLNAKLITQRKFDNLTKAERGGLSELDKAGFIKRQLVETRQITKHVAQILDSRMNTKYDENDKLIREVKVITLKSKLVSDFRKDFQFYKVREINNYHHAHDAYLNAVVGTALIKKYPKLESEFVYGDYKVYDVRKMIAKSEQEIGKATAKYFFYSNIMNFFKTEITLANGEIRKRPLIETNGETGEIVWDKGRDFATVRKVLSMPQVNIVKKTEVQTGGFSKESILPKRNSDKLIARKKDWDPKKYGGFDSPTVAYSVLVVAKVEKGKSKKLKSVKELLGITIMERSSFEKNPIDFLEAKGYKEVKKDLIIKLPKYSLFELENGRKRMLASAGELQKGNELALPSKYVNFLYLASHYEKLKGSPEDNEQKQLFVEQHKHYLDEIIEQISEFSKRVILADANLDKVLSAYNKHRDKPIREQAENIIHLFTLTNLGAPAAFKYFDTTIDRKRYTSTKEVLDATLIHQSITGLYETRIDLSQLGGDGGPAPEAAAKGGSGGTLNLEDEYRLYETSAEPEVSPGSTWLSDFPQAWAETGGMGLAVRQAPLIIPLKATSTPVSIKQYPMSQEAKLGIKPHIQRLLDQGILVPCQSPWNTPLLPVKKPGTNDYRPVQDLREVNKRVEDIHPTVPNPYNLLSGLPPSHRWYTVLDLKDAFFCLRLHPTSQPLFAFEWRDPGMGISGQLTWTRLPQGFKNSPTLFNEALHRDLADFRIQHPDLILLQYVDDILLAATSELDCQQGTRALLLTLGNLGYRASAKKAQLCQKQVKYLGYLLKEGQRWLTEARKETVMGQPTPKTPRQLREFLGTAGFCRLWIPGFAEMAAPLYPLTKPGTLFNWGPDQQKAYQEIKQALLTAPALGLPDLTKPFELFVDEKQGYAKGVLTQKLGPWRRPVAYLSKKLDPVAAGWPPCLRMVAAIAVLRKDAGKLTMGQPLVILAPHAVEALVKQPPDRWLSNARMTHYQAMLLDTDRVQFGPVVALNPATLLPLPEEGAPHDCLEILAETHGTRPDLTDQPIPDADHTWYTDGSSFLQEGQRKAGAAVTTETEVIWARALPAGTSAQRAELIALTQALKMAEGKRLNVYTDSRYAFATAHIHGEIYRRRGWLTSEGREIKNKSEILALLKALFLPKRLSIIHCLGHQKGDSAEARGNRLADQAAREAAIKTPPDTSTLLAGKRTADGSEFEKRTADGSEFESPKKKAKVE

SEQ ID NO: 7262 - protein, 2096 aa, synthetic construct; identical to SEQ ID NO: 4528

SEQ ID NO: 7263 - protein, 2096 aa, synthetic construct
MPAAKRVKLDGGDKKYSIGLDIGTNSVGWAVITDEYKVPSKKFKVLGNTDRHSIKKNLIGALLFDSGETAEATRLKRTARRRYTRRKNRICYLQEIFSNEMAKVDDSFFHRLEESFLVEEDKKHERHPIFGNIVDEVAYHEKYPTIYHLRKKLVDSTDKADLRLIYLALAHMIKFRGHFLIEGDLNPDNSDVDKLFIQLVQTYNQLFEENPINASGVDAKAILSARLSKSRRLENLIAQLPGEKKNGLFGNLIALSLGLTPNFKSNFDLAEDAKLQLSKDTYDDDLDNLLAQIGDQYADLFLAAKNLSDAILLSDILRVNTEITKAPLSASMIKRYDEHHQDLTLLKALVRQQLPEKYKEIFFDQSKNGYAGYIDGGASQEEFYKFIKPILEKMDGTEELLVKLNREDLLRKQRTFDNGSIPHQIHLGELHAILRRQEDFYPFLKDNREKIEKILTFRIPYYVGPLARGNSRFAWMTRKSEETITPWNFEEVVDKGASAQSFIERMTNFDKNLPNEKVLPKHSLLYEYFTVYNELTKVKYVTEGMRKPAFLSGEQKKAIVDLLFKTNRKVTVKQLKEDYFKKIECFDSVEISGVEDRFNASLGTYHDLLKIIKDKDFLDNEENEDILEDIVLTLTLFEDREMIEERLKTYAHLFDDKVMKQLKRRRYTGWGRLSRKLINGIRDKQSGKTILDFLKSDGFANRNFMQLIHDDSLTFKEDIQKAQVSGQGDSLHEHIANLAGSPAIKKGILQTVKVVDELVKVMGRHKPENIVIEMARENQTTQKGQKNSRERMKRIEEGIKELGSQILKEHPVENTQLQNEKLYLYYLQNGRDMYVDQELDINRLSDYDVDHIVPQSFLKDDSIDNKVLTRSDKARGKSDNVPSEEVVKKMKNYWRQLLNAKLITQRKFDNLTKAERGGLSELDKAGFIKRQLVETRQITKHVAQILDSRMNTKYDENDKLIREVKVITLKSKLVSDFRKDFQFYKVREINNYHHAHDAYLNAVVGTALIKKYPKLESEFVYGDYKVYDVRKMIAKSEQEIGKATAKYFFYSNIMNFFKTEITLANGEIRKRPLIETNGETGEIVWDKGRDFATVRKVLSMPQVNIVKKTEVQTGGFSKESILPKRNSDKLIARKKDWDPKKYGGFDSPTVAYSVLVVAKVEKGKSKKLKSVKELLGITIMERSSFEKNPIDFLEAKGYKEVKKDLIIKLPKYSLFELENGRKRMLASAGELQKGNELALPSKYVNFLYLASHYEKLKGSPEDNEQKQLFVEQHKHYLDEIIEQISEFSKRVILADANLDKVLSAYNKHRDKPIREQAENIIHLFTLTNLGAPAAFKYFDTTIDRKRYTSTKEVLDATLIHQSITGLYETRIDLSQLGGDGGPAPEAAAKGGSGGTLGIEDEYRLHETSTEPDVSLGSTWLSDFPQAWAETGGMGLAVRQAPLIIPLKATSTPVSIQQYPMSHEARLGIKPHIQRLLDQGILVPCQSPWNTPLLPVKKPGTNDYRPVQDLREVNKRVEDIHPTVPNPYNLLSGLPPSHQWYTVLDLKDAFFCLRLHPTSQPLFAFEWRDPGMGISGQLTWTRLPQGFKNSPTLFNEALHRDLADFRIQHPDLILLQYVDDILLAATSELDCQQGTRALLQTLGDLGYRASAKKAQICQKQVKYLGYLLREGQRWLTEARKETVMGQPVPKTPRQLREFLGTAGFCRLWIPGFAEMAAPLYPLTKPGTLFSWGPDQQKAYQEIKQALLTAPALGLPDLTKPFELFVDEKQGYAKGVLTQKLGPWRRPVAYLSKKLDPVAAGWPPCLRMVAAIAVLTKDAGKLTMGQPLVILAPHAVEALVKQPPDRWLSNARMTHYQAMLLDTDRVQFGPVVALNPATLLPLPEEGAPHDCLEILAETHGTRPDLTDQPIPDADHTWYTDGSSFLQEGQRKAGAAVTTETEVIWAGALPAGTSAQRAELIALTQALKMAEGKRLNVYTDSRYAFATAHIHGEIYRRRGWLTSEGREIKNKSEILALLKALFLPKRLSIIHCLGHQKGDSAEARGNRLADQAAREAAIKTPPDTSTLLAGKRTADGSEFEKRTADGSEFESPKKKAKVE

SEQ ID NO: 7264 - protein, 2096 aa, synthetic construct
MPAAKRVKLDGGDKKYSIGLDIGTNSVGWAVITDEYKVPSKKFKVLGNTDRHSIKKNLIGALLFDSGETAEATRLKRTARRRYTRRKNRICYLQEIFSNEMAKVDDSFFHRLEESFLVEEDKKHERHPIFGNIVDEVAYHEKYPTIYHLRKKLVDSTDKADLRLIYLALAHMIKFRGHFLIEGDLNPDNSDVDKLFIQLVQTYNQLFEENPINASGVDAKAILSARLSKSRRLENLIAQLPGEKKNGLFGNLIALSLGLTPNFKSNFDLAEDAKLQLSKDTYDDDLDNLLAQIGDQYADLFLAAKNLSDAILLSDILRVNTEITKAPLSASMIKRYDEHHQDLTLLKALVRQQLPEKYKEIFFDQSKNGYAGYIDGGASQEEFYKFIKPILEKMDGTEELLVKLNREDLLRKQRTFDNGSIPHQIHLGELHAILRRQEDFYPFLKDNREKIEKILTFRIPYYVGPLARGNSRFAWMTRKSEETITPWNFEEVVDKGASAQSFIERMTNFDKNLPNEKVLPKHSLLYEYFTVYNELTKVKYVTEGMRKPAFLSGEQKKAIVDLLFKTNRKVTVKQLKEDYFKKIECFDSVEISGVEDRFNASLGTYHDLLKIIKDKDFLDNEENEDILEDIVLTLTLFEDREMIEERLKTYAHLFDDKVMKQLKRRRYTGWGRLSRKLINGIRDKQSGKTILDFLKSDGFANRNFMQLIHDDSLTFKEDIQKAQVSGQGDSLHEHIANLAGSPAIKKGILQTVKVVDELVKVMGRHKPENIVIEMARENQTTQKGQKNSRERMKRIEEGIKELGSQILKEHPVENTQLQNEKLYLYYLQNGRDMYVDQELDINRLSDYDVDHIVPQSFLKDDSIDNKVLTRSDKARGKSDNVPSEEVVKKMKNYWRQLLNAKLITQRKFDNLTKAERGGLSELDKAGFIKRQLVETRQITKHVAQILDSRMNTKYDENDKLIREVKVITLKSKLVSDFRKDFQFYKVREINNYHHAHDAYLNAVVGTALIKKYPKLESEFVYGDYKVYDVRKMIAKSEQEIGKATAKYFFYSNIMNFFKTEITLANGEIRKRPLIETNGETGEIVWDKGRDFATVRKVLSMPQVNIVKKTEVQTGGFSKESILPKRNSDKLIARKKDWDPKKYGGFDSPTVAYSVLVVAKVEKGKSKKLKSVKELLGITIMERSSFEKNPIDFLEAKGYKEVKKDLIIKLPKYSLFELENGRKRMLASAGELQKGNELALPSKYVNFLYLASHYEKLKGSPEDNEQKQLFVEQHKHYLDEIIEQISEFSKRVILADANLDKVLSAYNKHRDKPIREQAENIIHLFTLTNLGAPAAFKYFDTTIDRKRYTSTKEVLDATLIHQSITGLYETRIDLSQLGGDGGPAPEAAAKGGSGGTLNIEDEYRLHETSKGPDVPLGSTWLSDFPQAWAETGGMGLAVRQAPLIIPLKATSTPVSIKQYPMSQEARLGIKPHIQRLLDQGILVPCQSPWNTPLLPVKKPGTNDYRPVQDLREVNKRVEDIHPTVPNPYNLLSGLPPSHQWYTVLDLKDAFFCLRLHPTSQSLFAFEWRDPEMGISGQLTWTRLPQGFKNSPTLFNEALHRDLADFRIQHPDLILLQYVDDLLLAATSELDCQQGTRALLQTLGDLGYRASAKKAQICQKQVKYLGYLLKEGQRWLTEARKETVMGQPTPKTPRQLREFLGTAGFCRLWIPGFAEMAAPLYPLTKPGTLFEWGPDQQKAYQEIKQALLTAPALGLPDLTKPFELFVDEKQGYAKGVLTQKLGPWRRPVAYLSKKLDPVAAGWPPCLRMVAAIAVLTKDAGKLTMGQPLVILAPHAVEALVKQPPDRWLSNARMTHYQALLLDTDRVQFGPIVALNPATLLPLPEEGLQHDCLDILAEAHGTRPDLTDQPLPDADHTWYTDGSSFLQEGQRKAGAAVTTETEVVWAKALPAGTSAQRAELIALTQALKMAEGKKLNVYTDSRYAFATAHIHGEIYRRRGWLTSEGKEIKNKDEILALLKALFLPKRLSIIHCPGHQKGNRAEARGNRMADQAAREVATRETPETSTLLAGKRTADGSEFEKRTADGSEFESPKKKAKVE

SEQ ID NO: 7265 - protein, 2088 aa, synthetic construct; identical to SEQ ID NO: 4529

SEQ ID NO: 7266 - protein, 2090 aa, synthetic construct
MPAAKRVKLDGGDKKYSIGLDIGTNSVGWAVITDEYKVPSKKFKVLGNTDRHSIKKNLIGALLFDSGETAEATRLKRTARRRYTRRKNRICYLQEIFSNEMAKVDDSFFHRLEESFLVEEDKKHERHPIFGNIVDEVAYHEKYPTIYHLRKKLVDSTDKADLRLIYLALAHMIKFRGHFLIEGDLNPDNSDVDKLFIQLVQTYNQLFEENPINASGVDAKAILSARLSKSRRLENLIAQLPGEKKNGLFGNLIALSLGLTPNFKSNFDLAEDAKLQLSKDTYDDDLDNLLAQIGDQYADLFLAAKNLSDAILLSDILRVNTEITKAPLSASMIKRYDEHHQDLTLLKALVRQQLPEKYKEIFFDQSKNGYAGYIDGGASQEEFYKFIKPILEKMDGTEELLVKLNREDLLRKQRTFDNGSIPHQIHLGELHAILRRQEDFYPFLKDNREKIEKILTFRIPYYVGPLARGNSRFAWMTRKSEETITPWNFEEVVDKGASAQSFIERMTNFDKNLPNEKVLPKHSLLYEYFTVYNELTKVKYVTEGMRKPAFLSGEQKKAIVDLLFKTNRKVTVKQLKEDYFKKIECFDSVEISGVEDRFNASLGTYHDLLKIIKDKDFLDNEENEDILEDIVLTLTLFEDREMIEERLKTYAHLFDDKVMKQLKRRRYTGWGRLSRKLINGIRDKQSGKTILDFLKSDGFANRNFMQLIHDDSLTFKEDIQKAQVSGQGDSLHEHIANLAGSPAIKKGILQTVKVVDELVKVMGRHKPENIVIEMARENQTTQKGQKNSRERMKRIEEGIKELGSQILKEHPVENTQLQNEKLYLYYLQNGRDMYVDQELDINRLSDYDVDHIVPQSFLKDDSIDNKVLTRSDKARGKSDNVPSEEVVKKMKNYWRQLLNAKLITQRKFDNLTKAERGGLSELDKAGFIKRQLVETRQITKHVAQILDSRMNTKYDENDKLIREVKVITLKSKLVSDFRKDFQFYKVREINNYHHAHDAYLNAVVGTALIKKYPKLESEFVYGDYKVYDVRKMIAKSEQEIGKATAKYFFYSNIMNFFKTEITLANGEIRKRPLIETNGETGEIVWDKGRDFATVRKVLSMPQVNIVKKTEVQTGGFSKESILPKRNSDKLIARKKDWDPKKYGGFDSPTVAYSVLVVAKVEKGKSKKLKSVKELLGITIMERSSFEKNPIDFLEAKGYKEVKKDLIIKLPKYSLFELENGRKRMLASAGELQKGNELALPSKYVNFLYLASHYEKLKGSPEDNEQKQLFVEQHKHYLDEIIEQISEFSKRVILADANLDKVLSAYNKHRDKPIREQAENIIHLFTLTNLGAPAAFKYFDTTIDRKRYTSTKEVLDATLIHQSITGLYETRIDLSQLGGDGGPAPEAAAKGGSGGTLQLDDEYRLYSPLVKPDQNIQFWLEQFPQAWAETAGMGLAKQVPPQVIQLKASATPVSVRQYPLSKEAQEGIRPHVQRLIQQGILVPVQSPWNTPLLPVRKPGTNDYRPVQDLREVNKRVQDIHPTVPNPYNLLCALPPQRSWYTVLDLKDAFFCLRLHPTSQPLFAFEWRDPGTGRTGQLTWTRLPQGFKNSPTIFDEALHRDLANFRIQHPQVTLLQYVDDLLLAGATKQDCLEGTKALLLELSDLGYRASAKKAQICRREVTYLGYSLRDGQRWLTEARKKTVVQIPAPTTAKQVREFLGTAGFCRLWIPGFATLAAPLYPLTKEKGEFSWAPEHQKAFDAIKKALLSAPALALPDVTKPFTLYVDERKGVARGVLTQTLGPWRRPVAYLSKKLDPVASGWPVCLKAIAAVAILVKDADKLTLGQNITVIAPHALENIVRQPPDRWMTNARMTHYQSLLLTERVTFAPPAALNPATLLPEETDEPVTHDCHQLLIEETGVRKDLTDIPLTGEVLTWFTDGSSYVVEGKRMAGAAVVDGTRTIWASSLPEGTSAQKAELMALTQALRLAEGKSINIYTDSRYAFATAHVHGAIYKQRGLLTSAGREIKNKEEILSLLEALHLPKRLAIIHCPGHQKAKDPISRGNQMADRVAKQAAQGVNLLAGKRTADGSEFEKRTADGSEFESPKKKAKVE

SEQ ID NO: 7267 - protein, 2088 aa, synthetic construct; identical to SEQ ID NO: 4529

SEQ ID NO: 7268 - protein, 2176 aa, synthetic construct
MPAAKRVKLDGGDKKYSIGLDIGTNSVGWAVITDEYKVPSKKFKVLGNTDRHSIKKNLIGALLFDSGETAEATRLKRTARRRYTRRKNRICYLQEIFSNEMAKVDDSFFHRLEESFLVEEDKKHERHPIFGNIVDEVAYHEKYPTIYHLRKKLVDSTDKADLRLIYLALAHMIKFRGHFLIEGDLNPDNSDVDKLFIQLVQTYNQLFEENPINASGVDAKAILSARLSKSRRLENLIAQLPGEKKNGLFGNLIALSLGLTPNFKSNFDLAEDAKLQLSKDTYDDDLDNLLAQIGDQYADLFLAAKNLSDAILLSDILRVNTEITKAPLSASMIKRYDEHHQDLTLLKALVRQQLPEKYKEIFFDQSKNGYAGYIDGGASQEEFYKFIKPILEKMDGTEELLVKLNREDLLRKQRTFDNGSIPHQIHLGELHAILRRQEDFYPFLKDNREKIEKILTFRIPYYVGPLARGNSRFAWMTRKSEETITPWNFEEVVDKGASAQSFIERMTNFDKNLPNEKVLPKHSLLYEYFTVYNELTKVKYVTEGMRKPAFLSGEQKKAIVDLLFKTNRKVTVKQLKEDYFKKIECFDSVEISGVEDRFNASLGTYHDLLKIIKDKDFLDNEENEDILEDIVLTLTLFEDREMIEERLKTYAHLFDDKVMKQLKRRRYTGWGRLSRKLINGIRDKQSGKTILDFLKSDGFANRNFMQLIHDDSLTFKEDIQKAQVSGQGDSLHEHIANLAGSPAIKKGILQTVKVVDELVKVMGRHKPENIVIEMARENQTTQKGQKNSRERMKRIEEGIKELGSQILKEHPVENTQLQNEKLYLYYLQNGRDMYVDQELDINRLSDYDVDHIVPQSFLKDDSIDNKVLTRSDKARGKSDNVPSEEVVKKMKNYWRQLLNAKLITQRKFDNLTKAERGGLSELDKAGFIKRQLVETRQITKHVAQILDSRMNTKYDENDKLIREVKVITLKSKLVSDFRKDFQFYKVREINNYHHAHDAYLNAVVGTALIKKYPKLESEFVYGDYKVYDVRKMIAKSEQEIGKATAKYFFYSNIMNFFKTEITLANGEIRKRPLIETNGETGEIVWDKGRDFATVRKVLSMPQVNIVKKTEVQTGGFSKESILPKRNSDKLIARKKDWDPKKYGGFDSPTVAYSVLVVAKVEKGKSKKLKSVKELLGITIMERSSFEKNPIDFLEAKGYKEVKKDLIIKLPKYSLFELENGRKRMLASAGELQKGNELALPSKYVNFLYLASHYEKLKGSPEDNEQKQLFVEQHKHYLDEIIEQISEFSKRVILADANLDKVLSAYNKHRDKPIREQAENIIHLFTLTNLGAPAAFKYFDTTIDRKRYTSTKEVLDATLIHQSITGLYETRIDLSQLGGDGGPAPEAAAKGGSGGMDPLQLLQPLEAEIKGTKLKAHWNSGATITCVPEAFLEDERPIQTMLIKTIHGEKQQDVYYLTFKVQGRKVEAEVLASPYDYILLNPSDVPWLMKKPLQLTVLVPLHEYQERLLQQTALPKEQKELLQKLFLKYDALWQHWENQVGHRRIKPHNIATGTLAPRPQKQYPINPKAKPSIQIVIDDLLKQGVLIQQNSTMNTPVYPVPKPDGKWRMVLDYREVNKTIPLIAAQNQHSAGILSSIYRGKYKTTLDLTNGFWAHPITPESYWLTAFTWQGKQYCWTRLPQGFLNSPALFTADVVDLLKEIPNVQAYVDDIYISHDDPQEHLEQLEKIFSILLNAGYVVSLKKSEIAQREVEFLGFNITKEGRGLTDTFKQKLLNITPPKDLKQLQSILGLLNFARNFIPNYSELVKPLYTIVANANGKFISWTEDNSNQLQHIISVLNQADNLEERNPETRLIIKVNSSPSAGYIRYYNEGSKRPIMYVNYIFSKAEAKFTQTEKLLTTMHKGLIKAMDLAMGQEILVYSPIVSMTKIQRTPLPERKALPVRWITWMTYLEDPRIQFHYDKSLPELQQIPNVTEDVIAKTKHPSEFAMVFYTDGSAIKHPDVNKSHSAGMGIAQVQFIPEYKIVHQWSIPLGDHTAQLAEIAAVEFACKKALKISGPVLIVTDSFYVAESANKELPYWKSNGFLNNKKKPLRHVSKWKSIAECLQLKPDIIIMHEKGHQQPMTTLHTEGNNLADKLATQGSYVVHAGKRTADGSEFEKRTADGSEFESPKKKAKVE

SEQ ID NO: 7269 - protein, 2087 aa, synthetic construct
MPAAKRVKLDGGDKKYSIGLDIGTNSVGWAVITDEYKVPSKKFKVLGNTDRHSIKKNLIGALLFDSGETAEATRLKRTARRRYTRRKNRICYLQEIFSNEMAKVDDSFFHRLEESFLVEEDKKHERHPIFGNIVDEVAYHEKYPTIYHLRKKLVDSTDKADLRLIYLALAHMIKFRGHFLIEGDLNPDNSDVDKLFIQLVQTYNQLFEENPINASGVDAKAILSARLSKSRRLENLIAQLPGEKKNGLFGNLIALSLGLTPNFKSNFDLAEDAKLQLSKDTYDDDLDNLLAQIGDQYADLFLAAKNLSDAILLSDILRVNTEITKAPLSASMIKRYDEHHQDLTLLKALVRQQLPEKYKEIFFDQSKNGYAGYIDGGASQEEFYKFIKPILEKMDGTEELLVKLNREDLLRKQRTFDNGSIPHQIHLGELHAILRRQEDFYPFLKDNREKIEKILTFRIPYYVGPLARGNSRFAWMTRKSEETITPWNFEEVVDKGASAQSFIERMTNFDKNLPNEKVLPKHSLLYEYFTVYNELTKVKYVTEGMRKPAFLSGEQKKAIVDLLFKTNRKVTVKQLKEDYFKKIECFDSVEISGVEDRFNASLGTYHDLLKIIKDKDFLDNEENEDILEDIVLTLTLFEDREMIEERLKTYAHLFDDKVMKQLKRRRYTGWGRLSRKLINGIRDKQSGKTILDFLKSDGFANRNFMQLIHDDSLTFKEDIQKAQVSGQGDSLHEHIANLAGSPAIKKGILQTVKVVDELVKVMGRHKPENIVIEMARENQTTQKGQKNSRERMKRIEEGIKELGSQILKEHPVENTQLQNEKLYLYYLQNGRDMYVDQELDINRLSDYDVDHIVPQSFLKDDSIDNKVLTRSDKARGKSDNVPSEEVVKKMKNYWRQLLNAKLITQRKFDNLTKAERGGLSELDKAGFIKRQLVETRQITKHVAQILDSRMNTKYDENDKLIREVKVITLKSKLVSDFRKDFQFYKVREINNYHHAHDAYLNAVVGTALIKKYPKLESEFVYGDYKVYDVRKMIAKSEQEIGKATAKYFFYSNIMNFFKTEITLANGEIRKRPLIETNGETGEIVWDKGRDFATVRKVLSMPQVNIVKKTEVQTGGFSKESILPKRNSDKLIARKKDWDPKKYGGFDSPTVAYSVLVVAKVEKGKSKKLKSVKELLGITIMERSSFEKNPIDFLEAKGYKEVKKDLIIKLPKYSLFELENGRKRMLASAGELQKGNELALPSKYVNFLYLASHYEKLKGSPEDNEQKQLFVEQHKHYLDEIIEQISEFSKRVILADANLDKVLSAYNKHRDKPIREQAENIIHLFTLTNLGAPAAFKYFDTTIDRKRYTSTKEVLDATLIHQSITGLYETRIDLSQLGGDGGPAPEAAAKGGSGGIPWLMKKPLQLTTLVPLQEYEERLLKQTMLTGSYKEKLQSLFLKYDALWQHWENQVGHRRIKPHHIATGTVNPRPQKQYPINPKAKASIQTVINDLLKQGVLIQQNSIMNTPVYPVPKPDGKWRMVLDYREVNKTIPLIAAQNQHSAGILSSIFRGKYKTTLDLSNGFWAHSITPESYWLTAFTWLGQQYCWTRLPQGFLNSPALFNADVVDLLKEVPNVQVYVDDIYISHDDPREHLEQLEKVFSLLLNAGYVVSLKKSEIAQHEVEFLGFNITKEGRGLTETFKQKLLNITPPRDLKQLQSILGKLNFARNFIPNFSELVKPLYNIIATAPGKYITWTTDNSQQLQNIISMLNSAENLEERNPEVRLIMKVNTSPSAGYIRFYNEFAKRPIMYLNYVYTKAEVKFTNTEKLLTTIHKGLIKALDLGMGQEILVYSPIVSMTKIQKTPLPERKALPIRWITWMSYLEDPRIQFHYDKTLPELQQVPTVTDDIIAKIKHPSEFSMVFYTDGSAIKHPNVNKSHNAGMGIAQVQFKPEFTVINTWSIPLGDHTAQLAEVAAVEFACKKALKIDGPVLIVTDSFYVAESVNKELPYWQSNGFFNNKKKPLKHVSKWKSIADCIQLKPDIIIIHEKGHQPTASTFHTEGNNLADKLATQGSYVVNAGKRTADGSEFEKRTADGSEFESPKKKAKVE

SEQ ID NO: 7270 - protein, 2176 aa, synthetic construct
MPAAKRVKLDGGDKKYSIGLDIGTNSVGWAVITDEYKVPSKKFKVLGNTDRHSIKKNLIGALLFDSGETAEATRLKRTARRRYTRRKNRICYLQEIFSNEMAKVDDSFFHRLEESFLVEEDKKHERHPIFGNIVDEVAYHEKYPTIYHLRKKLVDSTDKADLRLIYLALAHMIKFRGHFLIEGDLNPDNSDVDKLFIQLVQTYNQLFEENPINASGVDAKAILSARLSKSRRLENLIAQLPGEKKNGLFGNLIALSLGLTPNFKSNFDLAEDAKLQLSKDTYDDDLDNLLAQIGDQYADLFLAAKNLSDAILLSDILRVNTEITKAPLSASMIKRYDEHHQDLTLLKALVRQQLPEKYKEIFFDQSKNGYAGYIDGGASQEEFYKFIKPILEKMDGTEELLVKLNREDLLRKQRTFDNGSIPHQIHLGELHAILRRQEDFYPFLKDNREKIEKILTFRIPYYVGPLARGNSRFAWMTRKSEETITPWNFEEVVDKGASAQSFIERMTNFDKNLPNEKVLPKHSLLYEYFTVYNELTKVKYVTEGMRKPAFLSGEQKKAIVDLLFKTNRKVTVKQLKEDYFKKIECFDSVEISGVEDRFNASLGTYHDLLKIIKDKDFLDNEENEDILEDIVLTLTLFEDREMIEERLKTYAHLFDDKVMKQLKRRRYTGWGRLSRKLINGIRDKQSGKTILDFLKSDGFANRNFMQLIHDDSLTFKEDIQKAQVSGQGDSLHEHIANLAGSPAIKKGILQTVKVVDELVKVMGRHKPENIVIEMARENQTTQKGQKNSRERMKRIEEGIKELGSQILKEHPVENTQLQNEKLYLYYLQNGRDMYVDQELDINRLSDYDVDHIVPQSFLKDDSIDNKVLTRSDKARGKSDNVPSEEVVKKMKNYWRQLLNAKLITQRKFDNLTKAERGGLSELDKAGFIKRQLVETRQITKHVAQILDSRMNTKYDENDKLIREVKVITLKSKLVSDFRKDFQFYKVREINNYHHAHDAYLNAVVGTALIKKYPKLESEFVYGDYKVYDVRKMIAKSEQEIGKATAKYFFYSNIMNFFKTEITLANGEIRKRPLIETNGETGEIVWDKGRDFATVRKVLSMPQVNIVKKTEVQTGGFSKESILPKRNSDKLIARKKDWDPKKYGGFDSPTVAYSVLVVAKVEKGKSKKLKSVKELLGITIMERSSFEKNPIDFLEAKGYKEVKKDLIIKLPKYSLFELENGRKRMLASAGELQKGNELALPSKYVNFLYLASHYEKLKGSPEDNEQKQLFVEQHKHYLDEIIEQISEFSKRVILADANLDKVLSAYNKHRDKPIREQAENIIHLFTLTNLGAPAAFKYFDTTIDRKRYTSTKEVLDATLIHQSITGLYETRIDLSQLGGDGGPAPEAAAKGGSGGMDPLQLLQPLEAEIKGTKLKAHWNSGATITCVPQAFLEEEVPIKNIWIKTIHGEKEQPVYYLTFKIQGRKVEAEVISSPYDYILVSPSDIPWLMKKPLQLTTLVPLQEYEERLLKQTMLTGSYKEKLQSLFLKYDALWQHWENQVGHRRIKPHHIATGTVNPRPQKQYPINPKAKASIQTVINDLLKQGVLIQQNSIMNTPVYPVPKPDGKWRMVLDYREVNKTIPLIAAQNQHSAGILSSIFRGKYKTTLDLSNGFWAHSITPESYWLTAFTWLGQQYCWTRLPQGFLNSPALFNADVVDLLKEVPNVQVYVDDIYISHDDPREHLEQLEKVFSLLLNAGYVVSLKKSEIAQHEVEFLGFNITKEGRGLTETFKQKLLNITPPRDLKQLQSILGKLNFARNFIPNFSELVKPLYNIIATAPGKYITWTTDNSQQLQNIISMLNSAENLEERNPEVRLIMKVNTSPSAGYIRFYNEFAKRPIMYLNYVYTKAEVKFTNTEKLLTTIHKGLIKALDLGMGQEILVYSPIVSMTKIQKTPLPERKALPIRWITWMSYLEDPRIQFHYDKTLPELQQVPTVTDDIIAKIKHPSEFSMVFYTDGSAIKHPNVNKSHNAGMGIAQVQFKPEFTVINTWSIPLGDHTAQLAEVAAVEFACKKALKIDGPVLIVTDSFYVAESVNKELPYWQSNGFFNNKKKPLKHVSKWKSIADCIQLKPDIIIIHEKGHQPTASTFHTEGNNLADKLATQGSYVVNAGKRTADGSEFEKRTADGSEFESPKKKAKVE

SEQ ID NO: 7271 - protein, 2094 aa, synthetic construct
MPAAKRVKLDGGDKKYSIGLDIGTNSVGWAVITDEYKVPSKKFKVLGNTDRHSIKKNLIGALLFDSGETAEATRLKRTARRRYTRRKNRICYLQEIFSNEMAKVDDSFFHRLEESFLVEEDKKHERHPIFGNIVDEVAYHEKYPTIYHLRKKLVDSTDKADLRLIYLALAHMIKFRGHFLIEGDLNPDNSDVDKLFIQLVQTYNQLFEENPINASGVDAKAILSARLSKSRRLENLIAQLPGEKKNGLFGNLIALSLGLTPNFKSNFDLAEDAKLQLSKDTYDDDLDNLLAQIGDQYADLFLAAKNLSDAILLSDILRVNTEITKAPLSASMIKRYDEHHQDLTLLKALVRQQLPEKYKEIFFDQSKNGYAGYIDGGASQEEFYKFIKPILEKMDGTEELLVKLNREDLLRKQRTFDNGSIPHQIHLGELHAILRRQEDFYPFLKDNREKIEKILTFRIPYYVGPLARGNSRFAWMTRKSEETITPWNFEEVVDKGASAQSFIERMTNFDKNLPNEKVLPKHSLLYEYFTVYNELTKVKYVTEGMRKPAFLSGEQKKAIVDLLFKTNRKVTVKQLKEDYFKKIECFDSVEISGVEDRFNASLGTYHDLLKIIKDKDFLDNEENEDILEDIVLTLTLFEDREMIEERLKTYAHLFDDKVMKQLKRRRYTGWGRLSRKLINGIRDKQSGKTILDFLKSDGFANRNFMQLIHDDSLTFKEDIQKAQVSGQGDSLHEHIANLAGSPAIKKGILQTVKVVDELVKVMGRHKPENIVIEMARENQTTQKGQKNSRERMKRIEEGIKELGSQILKEHPVENTQLQNEKLYLYYLQNGRDMYVDQELDINRLSDYDVDHIVPQSFLKDDSIDNKVLTRSDKARGKSDNVPSEEVVKKMKNYWRQLLNAKLITQRKFDNLTKAERGGLSELDKAGFIKRQLVETRQITKHVAQILDSRMNTKYDENDKLIREVKVITLKSKLVSDFRKDFQFYKVREINNYHHAHDAYLNAVVGTALIKKYPKLESEFVYGDYKVYDVRKMIAKSEQEIGKATAKYFFYSNIMNFFKTEITLANGEIRKRPLIETNGETGEIVWDKGRDFATVRKVLSMPQVNIVKKTEVQTGGFSKESILPKRNSDKLIARKKDWDPKKYGGFDSPTVAYSVLVVAKVEKGKSKKLKSVKELLGITIMERSSFEKNPIDFLEAKGYKEVKKDLIIKLPKYSLFELENGRKRMLASAGELQKGNELALPSKYVNFLYLASHYEKLKGSPEDNEQKQLFVEQHKHYLDEIIEQISEFSKRVILADANLDKVLSAYNKHRDKPIREQAENIIHLFTLTNLGAPAAFKYFDTTIDRKRYTSTKEVLDATLIHQSITGLYETRIDLSQLGGDGGPAPEAAAKGGSGGVLNLEEEYRLHEKPVPSSIDPSWLQLFPTVWAERAGMGLANQVPPVVVELRSGASPVAVRQYPMSKEAREGIRPHIQRFLDLGVLVPCQSPWNTPLLPVKKPGTNDYRPVQDLREINKRVQDIHPTVPNPYNLLSSLPPSHTWYSVLDLKDAFFCLKLHPNSQPLFAFEWRDPEKGNTGQLTWTRLPQGFKNSPTLFDEALHRDLAPFRALNPQVVLLQYVDDLLVAAPTYRDCKEGTQKLLQELSKLGYRVSAKKAQLCQKEVTYLGYLLKEGKRWLTPARKATVMKIPPPTTPRQVREFLGTAGFCRLWIPGFASLAAPLYPLTKESIPFIWTEEHQKAFDRIKEALLSAPALALPDLTKPFTLYVDERAGVARGVLTQTLGPWRRPVAYLSKKLDPVASGWPTCLKAVAAVALLLKDADKLTLGQNVTVIASHSLESIVRQPPDRWMTNARMTHYQSLLLNERVSFAPPAVLNPATLLPVESEATPVHRCSEILAEETGTRRDLKDQPLPGVPAWYTDGSSFIAEGKRRAGAAIVDGKRTVWASSLPEGTSAQKAELVALTQALRLAEGKDINIYTDSRYAFATAHIHGAIYKQRGLLTSAGKDIKNKEEILALLEAIHLPKRVAIIHCPGHQKGNDPVATGNRRADEAAKQAALSTRVLAETTKPAGKRTADGSEFEKRTADGSEFESPKKKAKVE

SEQ ID NO: 7272 - protein, 2096 aa, synthetic construct
MPAAKRVKLDGGDKKYSIGLDIGTNSVGWAVITDEYKVPSKKFKVLGNTDRHSIKKNLIGALLFDSGETAEATRLKRTARRRYTRRKNRICYLQEIFSNEMAKVDDSFFHRLEESFLVEEDKKHERHPIFGNIVDEVAYHEKYPTIYHLRKKLVDSTDKADLRLIYLALAHMIKFRGHFLIEGDLNPDNSDVDKLFIQLVQTYNQLFEENPINASGVDAKAILSARLSKSRRLENLIAQLPGEKKNGLFGNLIALSLGLTPNFKSNFDLAEDAKLQLSKDTYDDDLDNLLAQIGDQYADLFLAAKNLSDAILLSDILRVNTEITKAPLSASMIKRYDEHHQDLTLLKALVRQQLPEKYKEIFFDQSKNGYAGYIDGGASQEEFYKFIKPILEKMDGTEELLVKLNREDLLRKQRTFDNGSIPHQIHLGELHAILRRQEDFYPFLKDNREKIEKILTFRIPYYVGPLARGNSRFAWMTRKSEETITPWNFEEVVDKGASAQSFIERMTNFDKNLPNEKVLPKHSLLYEYFTVYNELTKVKYVTEGMRKPAFLSGEQKKAIVDLLFKTNRKVTVKQLKEDYFKKIECFDSVEISGVEDRFNASLGTYHDLLKIIKDKDFLDNEENEDILEDIVLTLTLFEDREMIEERLKTYAHLFDDKVMKQLKRRRYTGWGRLSRKLINGIRDKQSGKTILDFLKSDGFANRNFMQLIHDDSLTFKEDIQKAQVSGQGDSLHEHIANLAGSPAIKKGILQTVKVVDELVKVMGRHKPENIVIEMARENQTTQKGQKNSRERMKRIEEGIKELGSQILKEHPVENTQLQNEKLYLYYLQNGRDMYVDQELDINRLSDYDVDHIVPQSFLKDDSIDNKVLTRSDKARGKSDNVPSEEVVKKMKNYWRQLLNAKLITQRKFDNLTKAERGGLSELDKAGFIKRQLVETRQITKHVAQILDSRMNTKYDENDKLIREVKVITLKSKLVSDFRKDFQFYKVREINNYHHAHDAYLNAVVGTALIKKYPKLESEFVYGDYKVYDVRKMIAKSEQEIGKATAKYFFYSNIMNFFKTEITLANGEIRKRPLIETNGETGEIVWDKGRDFATVRKVLSMPQVNIVKKTEVQTGGFSKESILPKRNSDKLIARKKDWDPKKYGGFDSPTVAYSVLVVAKVEKGKSKKLKSVKELLGITIMERSSFEKNPIDFLEAKGYKEVKKDLIIKLPKYSLFELENGRKRMLASAGELQKGNELALPSKYVNFLYLASHYEKLKGSPEDNEQKQLFVEQHKHYLDEIIEQISEFSKRVILADANLDKVLSAYNKHRDKPIREQAENIIHLFTLTNLGAPAAFKYFDTTIDRKRYTSTKEVLDATLIHQSITGLYETRIDLSQLGGDGGPAPEAAAKGGSGGTLNIEDEYRLHETSKEPDVPLGSTWLSDFPQAWAETGGMGLAVRQAPLIIPLKATSTPVSIKQYPMSQEARLGIKPHIQRLLDQGILVPCQSPWNTPLLPVKKPGTNDYRPVQDLREVNKRVEDIHPTVPNPYNLLSGLPPSHQWYTVLDLKDAFFCLRLHPTSQPLFAFEWRDPEMGISGQLTWTRLPQGFKNSPTLFNEALHRDLADFRIQHPDLILLQYVDDLLLAATSEQDCQRGTRALLQTLGNLGYRASAKKAQICQKQVKYLGYLLKEGQRWLTEARKETVMGQPTPKTPRQLREFLGTAGFCRLWIPGFAEMAAPLYPLTKPGTLFNWGPDQQKAYQEIKQALLTAPALGLPDLTKPFELFVDEKQGYAKGVLTQKLGPWRRPVAYLSKKLDPVAAGWPPCLRMVAAIAVLTKDAGKLTMGQPLVILAPHAVEALVKQPPDRWLSNARMTHYQAMLLDTDRVQFGPVVALNPATLLPLPEKEAPHDCLEILAETHGTRPDLTDQPIPDADYTWYTDGSSFLQEGQRRAGAAVTTETEVIWARALPAGTSAQRAELIALTQALKMAEGKKLNVYTDSRYAFATAHVHGEIYRRRGWLTSEGREIKNKNEILALLKALFLPKRLSIIHCPGHQKGNSAEARGNRMADQAAREAAMKAVLETSTLLAGKRTADGSEFEKRTADGSEFESPKKKAKVE

SEQ ID NO: 7273 - protein, 2098 aa, synthetic construct
MPAAKRVKLDGGDKKYSIGLDIGTNSVGWAVITDEYKVPSKKFKVLGNTDRHSIKKNLIGALLFDSGETAEATRLKRTARRRYTRRKNRICYLQEIFSNEMAKVDDSFFHRLEESFLVEEDKKHERHPIFGNIVDEVAYHEKYPTIYHLRKKLVDSTDKADLRLIYLALAHMIKFRGHFLIEGDLNPDNSDVDKLFIQLVQTYNQLFEENPINASGVDAKAILSARLSKSRRLENLIAQLPGEKKNGLFGNLIALSLGLTPNFKSNFDLAEDAKLQLSKDTYDDDLDNLLAQIGDQYADLFLAAKNLSDAILLSDILRVNTEITKAPLSASMIKRYDEHHQDLTLLKALVRQQLPEKYKEIFFDQSKNGYAGYIDGGASQEEFYKFIKPILEKMDGTEELLVKLNREDLLRKQRTFDNGSIPHQIHLGELHAILRRQEDFYPFLKDNREKIEKILTFRIPYYVGPLARGNSRFAWMTRKSEETITPWNFEEVVDKGASAQSFIERMTNFDKNLPNEKVLPKHSLLYEYFTVYNELTKVKYVTEGMRKPAFLSGEQKKAIVDLLFKTNRKVTVKQLKEDYFKKIECFDSVEISGVEDRFNASLGTYHDLLKIIKDKDFLDNEENEDILEDIVLTLTLFEDREMIEERLKTYAHLFDDKVMKQLKRRRYTGWGRLSRKLINGIRDKQSGKTILDFLKSDGFANRNFMQLIHDDSLTFKEDIQKAQVSGQGDSLHEHIANLAGSPAIKKGILQTVKVVDELVKVMGRHKPENIVIEMARENQTTQKGQKNSRERMKRIEEGIKELGSQILKEHPVENTQLQNEKLYLYYLQNGRDMYVDQELDINRLSDYDVDHIVPQSFLKDDSIDNKVLTRSDKARGKSDNVPSEEVVKKMKNYWRQLLNAKLITQRKFDNLTKAERGGLSELDKAGFIKRQLVETRQITKHVAQILDSRMNTKYDENDKLIREVKVITLKSKLVSDFRKDFQFYKVREINNYHHAHDAYLNAVVGTALIKKYPKLESEFVYGDYKVYDVRKMIAKSEQEIGKATAKYFFYSNIMNFFKTEITLANGEIRKRPLIETNGETGEIVWDKGRDFATVRKVLSMPQVNIVKKTEVQTGGFSKESILPKRNSDKLIARKKDWDPKKYGGFDSPTVAYSVLVVAKVEKGKSKKLKSVKELLGITIMERSSFEKNPIDFLEAKGYKEVKKDLIIKLPKYSLFELENGRKRMLASAGELQKGNELALPSKYVNFLYLASHYEKLKGSPEDNEQKQLFVEQHKHYLDEIIEQISEFSKRVILADANLDKVLSAYNKHRDKPIREQAENIIHLFTLTNLGAPAAFKYFDTTIDRKRYTSTKEVLDATLIHQSITGLYETRIDLSQLGGDGGGGGGSSEAAAKGGTAPLEEEYRLFLEAPIQNVTLLEQWKREIPKVWAEINPPGLASTQAPIHVQLLSTALPVRVRQYPITLEAKRSLRETIRKFRAAGILRPVHSPWNTPLLPVRKSGTSEYRMVQDLREVNKRVETIHPTVPNPYTLLSLLPPDRIWYSVLDLKDAFFCIPLAPESQLIFAFEWADAEEGESGQLTWTRLPQGFKNSPTLFNEALNRDLQGFRLDHPSVSLLQYVDDLLIAADTQAACLSATRDLLMTLAELGYRVSGKKAQLCQEEVTYLGFKIHKGSRSLSNSRTQAILQIPVPKTKRQVREFLGTIGYCRLWIPGFAELAQPLYAATRPGNDPLVWGEKEEEAFQSLKLALTQPPALALPSLDKPFQLFVEETSGAAKGVLTQALGPWKRPVAYLSKRLDPVAAGWPRCLRAIAAAALLTREASKLTFGQDIEITSSHNLESLLRSPPDKWLTNARITQYQVLLLDPPRVRFKQTAALNPATLLPETDDTLPIHHCLDTLDSLTSTRPDLTDQPLAQAEATLFTDGSSYIRDGKRYAGAAVVTLDSVIWAEPLPIGTSAQKAELIALTKALEWSKDKSVNIYTDSRYAFATLHVHGMIYRERGWLTAGGKAIKNAPEILALLTAVWLPKRVAVMHCKGHQKDDAPTSTGNRRADEVAREVAIRPLSTQATISAGKRTADGSEFEKRTADGSEFESPKKKAKVE

SEQ ID NO: 7274 - protein, 2218 aa, synthetic construct
MPAAKRVKLDGGDKKYSIGLDIGTNSVGWAVITDEYKVPSKKFKVLGNTDRHSIKKNLIGALLFDSGETAEATRLKRTARRRYTRRKNRICYLQEIFSNEMAKVDDSFFHRLEESFLVEEDKKHERHPIFGNIVDEVAYHEKYPTIYHLRKKLVDSTDKADLRLIYLALAHMIKFRGHFLIEGDLNPDNSDVDKLFIQLVQTYNQLFEENPINASGVDAKAILSARLSKSRRLENLIAQLPGEKKNGLFGNLIALSLGLTPNFKSNFDLAEDAKLQLSKDTYDDDLDNLLAQIGDQYADLFLAAKNLSDAILLSDILRVNTEITKAPLSASMIKRYDEHHQDLTLLKALVRQQLPEKYKEIFFDQSKNGYAGYIDGGASQEEFYKFIKPILEKMDGTEELLVKLNREDLLRKQRTFDNGSIPHQIHLGELHAILRRQEDFYPFLKDNREKIEKILTFRIPYYVGPLARGNSRFAWMTRKSEETITPWNFEEVVDKGASAQSFIERMTNFDKNLPNEKVLPKHSLLYEYFTVYNELTKVKYVTEGMRKPAFLSGEQKKAIVDLLFKTNRKVTVKQLKEDYFKKIECFDSVEISGVEDRFNASLGTYHDLLKIIKDKDFLDNEENEDILEDIVLTLTLFEDREMIEERLKTYAHLFDDKVMKQLKRRRYTGWGRLSRKLINGIRDKQSGKTILDFLKSDGFANRNFMQLIHDDSLTFKEDIQKAQVSGQGDSLHEHIANLAGSPAIKKGILQTVKVVDELVKVMGRHKPENIVIEMARENQTTQKGQKNSRERMKRIEEGIKELGSQILKEHPVENTQLQNEKLYLYYLQNGRDMYVDQELDINRLSDYDVDHIVPQSFLKDDSIDNKVLTRSDKARGKSDNVPSEEVVKKMKNYWRQLLNAKLITQRKFDNLTKAERGGLSELDKAGFIKRQLVETRQITKHVAQILDSRMNTKYDENDKLIREVKVITLKSKLVSDFRKDFQFYKVREINNYHHAHDAYLNAVVGTALIKKYPKLESEFVYGDYKVYDVRKMIAKSEQEIGKATAKYFFYSNIMNFFKTEITLANGEIRKRPLIETNGETGEIVWDKGRDFATVRKVLSMPQVNIVKKTEVQTGGFSKESILPKRNSDKLIARKKDWDPKKYGGFDSPTVAYSVLVVAKVEKGKSKKLKSVKELLGITIMERSSFEKNPIDFLEAKGYKEVKKDLIIKLPKYSLFELENGRKRMLASAGELQKGNELALPSKYVNFLYLASHYEKLKGSPEDNEQKQLFVEQHKHYLDEIIEQISEFSKRVILADANLDKVLSAYNKHRDKPIREQAENIIHLFTLTNLGAPAAFKYFDTTIDRKRYTSTKEVLDATLIHQSITGLYETRIDLSQLGGDGGGGGGSSEAAAKGGTLGDQGSRGSDPLPEPRVTLTVEGIPTEFLVNTGAEHSVLTKPMGKMGSKRTVVAGATGSKVYPWTTKRLLKIGQKQVTHSFLVIPECPAPLLGRDLLTKLKAQIQFSTEGPQVTWEDRPAMCLVLNLEEEYRLHEKPVPPSIDPSWLQLFPMVWAEKAGMGLANQVPPVVVELKSDASPVAVRQYPMSKEAREGIRPHIQRFLDLGILVPCQSPWNTPLLPVKKPGTNDYRPVQDLREVNKRVQDIHPTVPNPYNLLSSLPPSHTWYSVLDLKDAFFCLKLHPNSQPLFAFEWRDPEKGNTGQLTWTRLPQGFKNSPTLFNEALHRDLASFRALNPQVVMLQYVDDLLVAAPTYRDCKEGTRRLLQELSKLGYRVSAKKAQLCREEVTYLGYLLKGGKRWLTPARKATVMKIPTPTTPRQVREFLGTAGFCRLWIPGFASLAAPLYPLTRPKVPFTWTEAHQEAFGRIKEALLSAPALALPDLTKPFALYVDEKEGVARGVLTQTLGPWRRPVAYLSKKLDPVASGWPTCLKAIAAVALLLKDADKLTLGQNVLVIAPHNLESIVRQPPDRWMTNARMTHYQSLLLNERVSFAPPAILNPATLLPVESDDTPIHICSEILAEETGTRPDLRDQPLPGVPAWYTDGSSFIMDGRRQAGAAIVDNKRTVWASNLPEGTSAQKAELIALTQALRLAEGKSINIYTDSRYAFATAHVHGAIYKQRGWLTSAGKDIKNKEEILALLEAIHLPKRVAIIHCPGHQRGTDPVATGNRKADEAAKQAAQSTRILTETTKNAGKRTADGSEFEKRTADGSEFESPKKKAKVE

SEQ ID NO: 7275 - protein, 2096 aa, synthetic construct
MPAAKRVKLDGGDKKYSIGLDIGTNSVGWAVITDEYKVPSKKFKVLGNTDRHSIKKNLIGALLFDSGETAEATRLKRTARRRYTRRKNRICYLQEIFSNEMAKVDDSFFHRLEESFLVEEDKKHERHPIFGNIVDEVAYHEKYPTIYHLRKKLVDSTDKADLRLIYLALAHMIKFRGHFLIEGDLNPDNSDVDKLFIQLVQTYNQLFEENPINASGVDAKAILSARLSKSRRLENLIAQLPGEKKNGLFGNLIALSLGLTPNFKSNFDLAEDAKLQLSKDTYDDDLDNLLAQIGDQYADLFLAAKNLSDAILLSDILRVNTEITKAPLSASMIKRYDEHHQDLTLLKALVRQQLPEKYKEIFFDQSKNGYAGYIDGGASQEEFYKFIKPILEKMDGTEELLVKLNREDLLRKQRTFDNGSIPHQIHLGELHAILRRQEDFYPFLKDNREKIEKILTFRIPYYVGPLARGNSRFAWMTRKSEETITPWNFEEVVDKGASAQSFIERMTNFDKNLPNEKVLPKHSLLYEYFTVYNELTKVKYVTEGMRKPAFLSGEQKKAIVDLLFKTNRKVTVKQLKEDYFKKIECFDSVEISGVEDRFNASLGTYHDLLKIIKDKDFLDNEENEDILEDIVLTLTLFEDREMIEERLKTYAHLFDDKVMKQLKRRRYTGWGRLSRKLINGIRDKQSGKTILDFLKSDGFANRNFMQLIHDDSLTFKEDIQKAQVSGQGDSLHEHIANLAGSPAIKKGILQTVKVVDELVKVMGRHKPENIVIEMARENQTTQKGQKNSRERMKRIEEGIKELGSQILKEHPVENTQLQNEKLYLYYLQNGRDMYVDQELDINRLSDYDVDHIVPQSFLKDDSIDNKVLTRSDKARGKSDNVPSEEVVKKMKNYWRQLLNAKLITQRKFDNLTKAERGGLSELDKAGFIKRQLVETRQITKHVAQILDSRMNTKYDENDKLIREVKVITLKSKLVSDFRKDFQFYKVREINNYHHAHDAYLNAVVGTALIKKYPKLESEFVYGDYKVYDVRKMIAKSEQEIGKATAKYFFYSNIMNFFKTEITLANGEIRKRPLIETNGETGEIVWDKGRDFATVRKVLSMPQVNIVKKTEVQTGGFSKESILPKRNSDKLIARKKDWDPKKYGGFDSPTVAYSVLVVAKVEKGKSKKLKSVKELLGITIMERSSFEKNPIDFLEAKGYKEVKKDLIIKLPKYSLFELENGRKRMLASAGELQKGNELALPSKYVNFLYLASHYEKLKGSPEDNEQKQLFVEQHKHYLDEIIEQISEFSKRVILADANLDKVLSAYNKHRDKPIREQAENIIHLFTLTNLGAPAAFKYFDTTIDRKRYTSTKEVLDATLIHQSITGLYETRIDLSQLGGDGGGGGGSSEAAAKGGTLNLEDEYRLYETSAEPEVSPGSTWLSDFPQAWAETGGMGLAVRQAPLIIPLKATSTPVSIKQYPMSQEAKLGIKPHIQRLLDQGILVPCQSPWNTPLLPVKKPGTNDYRPVQDLREVNKRVEDIHPTVPNPYNLLSGLPPSHRWYTVLDLKDAFFCLRLHPTSQPLFAFEWRDPGMGISGQLTWTRLPQGFKNSPTLFNEALHRDLADFRIQHPDLILLQYVDDILLAATSELDCQQGTRALLLTLGNLGYRASAKKAQLCQKQVKYLGYLLKEGQRWLTEARKETVMGQPTPKTPRQLREFLGKAGFCRLFIPGFAEMAAPLYPLTKPGTLFNWGPDQQKAYQEIKQALLTAPALGLPDLTKPFELFVDEKQGYAKGVLTQKLGPWRRPVAYLSKKLDPVAAGWPPCLRMVAAIAVLRKDAGKLTMGQPLVILAPHAVEALVKQPPDRWLSNARMTHYQAMLLDTDRVQFGPVVALNPATLLPLPEEGAPHDCLEILAETHGTRPDLTDQPIPDADHTWYTDGSSFLQEGQRKAGAAVTTETEVIWARALPAGTSAQRAELIALTQALKMAEGKRLNVYTDSRYAFATAHIHGEIYRRRGWLTSEGREIKNKSEILALLKALFLPKRLSIIHCLGHQKGDSAEARGNRLADQAAREAAIKTPPDTSTLLAGKRTADGSEFEKRTADGSEFESPKKKAKVE

SEQ ID NO: 7276 - protein, 2096 aa, synthetic construct
MPAAKRVKLDGGDKKYSIGLDIGTNSVGWAVITDEYKVPSKKFKVLGNTDRHSIKKNLIGALLFDSGETAEATRLKRTARRRYTRRKNRICYLQEIFSNEMAKVDDSFFHRLEESFLVEEDKKHERHPIFGNIVDEVAYHEKYPTIYHLRKKLVDSTDKADLRLIYLALAHMIKFRGHFLIEGDLNPDNSDVDKLFIQLVQTYNQLFEENPINASGVDAKAILSARLSKSRRLENLIAQLPGEKKNGLFGNLIALSLGLTPNFKSNFDLAEDAKLQLSKDTYDDDLDNLLAQIGDQYADLFLAAKNLSDAILLSDILRVNTEITKAPLSASMIKRYDEHHQDLTLLKALVRQQLPEKYKEIFFDQSKNGYAGYIDGGASQEEFYKFIKPILEKMDGTEELLVKLNREDLLRKQRTFDNGSIPHQIHLGELHAILRRQEDFYPFLKDNREKIEKILTFRIPYYVGPLARGNSRFAWMTRKSEETITPWNFEEVVDKGASAQSFIERMTNFDKNLPNEKVLPKHSLLYEYFTVYNELTKVKYVTEGMRKPAFLSGEQKKAIVDLLFKTNRKVTVKQLKEDYFKKIECFDSVEISGVEDRFNASLGTYHDLLKIIKDKDFLDNEENEDILEDIVLTLTLFEDREMIEERLKTYAHLFDDKVMKQLKRRRYTGWGRLSRKLINGIRDKQSGKTILDFLKSDGFANRNFMQLIHDDSLTFKEDIQKAQVSGQGDSLHEHIANLAGSPAIKKGILQTVKVVDELVKVMGRHKPENIVIEMARENQTTQKGQKNSRERMKRIEEGIKELGSQILKEHPVENTQLQNEKLYLYYLQNGRDMYVDQELDINRLSDYDVDHIVPQSFLKDDSIDNKVLTRSDKARGKSDNVPSEEVVKKMKNYWRQLLNAKLITQRKFDNLTKAERGGLSELDKAGFIKRQLVETRQITKHVAQILDSRMNTKYDENDKLIREVKVITLKSKLVSDFRKDFQFYKVREINNYHHAHDAYLNAVVGTALIKKYPKLESEFVYGDYKVYDVRKMIAKSEQEIGKATAKYFFYSNIMNFFKTEITLANGEIRKRPLIETNGETGEIVWDKGRDFATVRKVLSMPQVNIVKKTEVQTGGFSKESILPKRNSDKLIARKKDWDPKKYGGFDSPTVAYSVLVVAKVEKGKSKKLKSVKELLGITIMERSSFEKNPIDFLEAKGYKEVKKDLIIKLPKYSLFELENGRKRMLASAGELQKGNELALPSKYVNFLYLASHYEKLKGSPEDNEQKQLFVEQHKHYLDEIIEQISEFSKRVILADANLDKVLSAYNKHRDKPIREQAENIIHLFTLTNLGAPAAFKYFDTTIDRKRYTSTKEVLDATLIHQSITGLYETRIDLSQLGGDGGGGGGSSEAAAKGGTLNIEDEYRLHETSKEPDVSLGSTWLSDFPQAWAETGGMGLAVRQAPLIIPLKATSTPVSIKQYPMSQEARLGIKPHIQRLLDQGILVPCQSPWNTPLLPVKKPGTNDYRPVQDLREVNKRVEDIHPTVPNPYNLLSGLPPSHQWYTVLDLKDAFFCLRLHPTSQPLFAFEWRDPEMGISGQLTWTRLPQGFKNSPTLFNEALHRDLAGFRIQHPDLILLQYVDDLLLAATSELDCQQGTRALLQTLGDLGYRASAKKAQICQKQVKYLGYLLKEGQRWLTEARKETVMGQPIPKTPRQLREFLGTAGFCRLWIPGFAEMAAPLYPLTKPGTLFNWGPDQQKAFQEIKQALLTAPALGLPDLTKPFELFVDEKQGYAKGVLTQKLGPWRRPVAYLSKKLDPVAAGWPPCLRMVAAIAVLTKDAGKLTMGQPLVILAPHAVEALVKQPPDRWLSNARMTHYQALLLDTDRVQFGPVVALNPATLLPLPEEGLQHDCLDILAEAHGTRSDLMDQPLPDADHTWYTDGSSFLQEGQRKAGAAVTTETEVIWARALPAGTSAQRAELIALTQALKMAEGKKLNVYTDSRYAFATAHIHGEIYRRRGWLTSEGKEIKNKDEILALLKALFLPKRLSIIHCPGHQKGNSAEARGNRMADQAAREVATRETPETSTLLAGKRTADGSEFEKRTADGSEFESPKKKAKVE

SEQ ID NO: 7277 - protein, 2096 aa, synthetic construct
MPAAKRVKLDGGDKKYSIGLDIGTNSVGWAVITDEYKVPSKKFKVLGNTDRHSIKKNLIGALLFDSGETAEATRLKRTARRRYTRRKNRICYLQEIFSNEMAKVDDSFFHRLEESFLVEEDKKHERHPIFGNIVDEVAYHEKYPTIYHLRKKLVDSTDKADLRLIYLALAHMIKFRGHFLIEGDLNPDNSDVDKLFIQLVQTYNQLFEENPINASGVDAKAILSARLSKSRRLENLIAQLPGEKKNGLFGNLIALSLGLTPNFKSNFDLAEDAKLQLSKDTYDDDLDNLLAQIGDQYADLFLAAKNLSDAILLSDILRVNTEITKAPLSASMIKRYDEHHQDLTLLKALVRQQLPEKYKEIFFDQSKNGYAGYIDGGASQEEFYKFIKPILEKMDGTEELLVKLNREDLLRKQRTFDNGSIPHQIHLGELHAILRRQEDFYPFLKDNREKIEKILTFRIPYYVGPLARGNSRFAWMTRKSEETITPWNFEEVVDKGASAQSFIERMTNFDKNLPNEKVLPKHSLLYEYFTVYNELTKVKYVTEGMRKPAFLSGEQKKAIVDLLFKTNRKVTVKQLKEDYFKKIECFDSVEISGVEDRFNASLGTYHDLLKIIKDKDFLDNEENEDILEDIVLTLTLFEDREMIEERLKTYAHLFDDKVMKQLKRRRYTGWGRLSRKLINGIRDKQSGKTILDFLKSDGFANRNFMQLIHDDSLTFKEDIQKAQVSGQGDSLHEHIANLAGSPAIKKGILQTVKVVDELVKVMGRHKPENIVIEMARENQTTQKGQKNSRERMKRIEEGIKELGSQILKEHPVENTQLQNEKLYLYYLQNGRDMYVDQELDINRLSDYDVDHIVPQSFLKDDSIDNKVLTRSDKARGKSDNVPSEEVVKKMKNYWRQLLNAKLITQRKFDNLTKAERGGLSELDKAGFIKRQLVETRQITKHVAQILDSRMNTKYDENDKLIREVKVITLKSKLVSDFRKDFQFYKVREINNYHHAHDAYLNAVVGTALIKKYPKLESEFVYGDYKVYDVRKMIAKSEQEIGKATAKYFFYSNIMNFFKTEITLANGEIRKRPLIETNGETGEIVWDKGRDFATVRKVLSMPQVNIVKKTEVQTGGFSKESILPKRNSDKLIARKKDWDPKKYGGFDSPTVAYSVLVVAKVEKGKSKKLKSVKELLGITIMERSSFEKNPIDFLEAKGYKEVKKDLIIKLPKYSLFELENGRKRMLASAGELQKGNELALPSKYVNFLYLASHYEKLKGSPEDNEQKQLFVEQHKHYLDEIIEQISEFSKRVILADANLDKVLSAYNKHRDKPIREQAENIIHLFTLTNLGAPAAFKYFDTTIDRKRYTSTKEVLDATLIHQSITGLYETRIDLSQLGGDGGGGGGSSEAAAKGGTLNIEDEHRLHETSKEPDVSLGSTWLSDFPQAWAETGGMGLAVRQAPLIIPLKATSTPVSIKQYPMSQEARLGIKPHIQRLLDQGILVPCQSPWNTPLLPVKKPGTNDYRPVQDLREVNKRVEDIHPTVPNPYNLLSGLPPSHQWYTVLDLKDAFFCLRLHPTSQPLFAFEWRDPEMGISGQLTWTRLPQGFKNSPTLFDEALHRDLADFRIQHPDLILLQYVDDLLLAATSELDCQQGTRALLQTLGNLGYRASAKKAQICQKQVKYLGYLLKEGQRWLTEARKETVMGQPTPKTPRQLREFLGTAGFCRLWIPGFAEMAAPLYPLTKTGTLFNWGPDQQKAYQEIKQALLTAPALGLPDLTKPFELFVDEKQGYAKGVLTQKLGPWRRPVAYLSKKLDPVAAGWPPCLRMVAAIAVLTKDAGKLTMGQPLVILAPHAVEALVKQPPDRWLSNARMTHYQALLLDTDRVQFGPVVALNPATLLPLPEEGLQHNCLDILAEAHGTRPDLTDQPLPDADHTWYTDGSSLLQEGQRKAGAAVTTETEVIWAKALPAGTSAQRAELIALTQALKMAEGKKLNVYTDSRYAFATAHIHGEIYRRRGLLTSEGKEIKNKDEILALLKALFLPKRLSIIHCPGHQKGHSAEARGNRMADQAARKAAITETPDTSTLLAGKRTADGSEFEKRTADGSEFESPKKKAKVE

SEQ ID NO: 7278 - protein, 2088 aa, synthetic construct
MPAAKRVKLDGGDKKYSIGLDIGTNSVGWAVITDEYKVPSKKFKVLGNTDRHSIKKNLIGALLFDSGETAEATRLKRTARRRYTRRKNRICYLQEIFSNEMAKVDDSFFHRLEESFLVEEDKKHERHPIFGNIVDEVAYHEKYPTIYHLRKKLVDSTDKADLRLIYLALAHMIKFRGHFLIEGDLNPDNSDVDKLFIQLVQTYNQLFEENPINASGVDAKAILSARLSKSRRLENLIAQLPGEKKNGLFGNLIALSLGLTPNFKSNFDLAEDAKLQLSKDTYDDDLDNLLAQIGDQYADLFLAAKNLSDAILLSDILRVNTEITKAPLSASMIKRYDEHHQDLTLLKALVRQQLPEKYKEIFFDQSKNGYAGYIDGGASQEEFYKFIKPILEKMDGTEELLVKLNREDLLRKQRTFDNGSIPHQIHLGELHAILRRQEDFYPFLKDNREKIEKILTFRIPYYVGPLARGNSRFAWMTRKSEETITPWNFEEVVDKGASAQSFIERMTNFDKNLPNEKVLPKHSLLYEYFTVYNELTKVKYVTEGMRKPAFLSGEQKKAIVDLLFKTNRKVTVKQLKEDYFKKIECFDSVEISGVEDRFNASLGTYHDLLKIIKDKDFLDNEENEDILEDIVLTLTLFEDREMIEERLKTYAHLFDDKVMKQLKRRRYTGWGRLSRKLINGIRDKQSGKTILDFLKSDGFANRNFMQLIHDDSLTFKEDIQKAQVSGQGDSLHEHIANLAGSPAIKKGILQTVKVVDELVKVMGRHKPENIVIEMARENQTTQKGQKNSRERMKRIEEGIKELGSQILKEHPVENTQLQNEKLYLYYLQNGRDMYVDQELDINRLSDYDVDHIVPQSFLKDDSIDNKVLTRSDKARGKSDNVPSEEVVKKMKNYWRQLLNAKLITQRKFDNLTKAERGGLSELDKAGFIKRQLVETRQITKHVAQILDSRMNTKYDENDKLIREVKVITLKSKLVSDFRKDFQFYKVREINNYHHAHDAYLNAVVGTALIKKYPKLESEFVYGDYKVYDVRKMIAKSEQEIGKATAKYFFYSNIMNFFKTEITLANGEIRKRPLIETNGETGEIVWDKGRDFATVRKVLSMPQVNIVKKTEVQTGGFSKESILPKRNSDKLIARKKDWDPKKYGGFDSPTVAYSVLVVAKVEKGKSKKLKSVKELLGITIMERSSFEKNPIDFLEAKGYKEVKKDLIIKLPKYSLFELENGRKRMLASAGELQKGNELALPSKYVNFLYLASHYEKLKGSPEDNEQKQLFVEQHKHYLDEIIEQISEFSKRVILADANLDKVLSAYNKHRDKPIREQAENIIHLFTLTNLGAPAAFKYFDTTIDRKRYTSTKEVLDATLIHQSITGLYETRIDLSQLGGDGGGGGGSSEAAAKGGLDDEYRLYSPLVKPDQNIQFWLEQFPQAWAETAGMGLAKQVPPQVIQLKASATPVSVRQYPLSKEAQEGIRPHVQRLIQQGILVPVQSPWNTPLLPVRKPGTNDYRPVQDLREVNKRVQDIHPTVPNPYNLLCALPPQRSWYTVLDLKDAFFCLRLHPTSQPLFAFEWRDPGTGRTGQLTWTRLPQGFKNSPTIFNEALHRDLANFRIQHPQVTLLQYVDDLLLAGATKQDCLEGTKALLLELSDLGYRASAKKAQICRREVTYLGYSLRDGQRWLTEARKKTVVQIPAPTTAKQVREFLGKAGFCRLFIPGFATLAAPLYPLTKPKGEFSWAPEHQKAFDAIKKALLSAPALALPDVTKPFTLYVDERKGVARGVLTQTLGPWRRPVAYLSKKLDPVASGWPVCLKAIAAVAILVKDADKLTLGQNITVIAPHALENIVRQPPDRWMTNARMTHYQSLLLTERVTFAPPAALNPATLLPEETDEPVTHDCHQLLIEETGVRKDLTDIPLTGEVLTWFTDGSSYVVEGKRMAGAAVVDGTRTIWASSLPEGTSAQKAELMALTQALRLAEGKSINIYTDSRYAFATAHVHGAIYKQRGWLTSAGREIKNKEEILSLLEALHLPKRLAIIHCPGHQKAKDPISRGNQMADRVAKQAAQGVNLLPAGKRTADGSEFEKRTADGSEFESPKKKAKVE

SEQ ID NO: 7279 - protein, 2088 aa, synthetic construct; identical to SEQ ID NO: 7278

SEQ ID NO: 7280 - protein, 2090 aa, synthetic construct
MPAAKRVKLDGGDKKYSIGLDIGTNSVGWAVITDEYKVPSKKFKVLGNTDRHSIKKNLIGALLFDSGETAEATRLKRTARRRYTRRKNRICYLQEIFSNEMAKVDDSFFHRLEESFLVEEDKKHERHPIFGNIVDEVAYHEKYPTIYHLRKKLVDSTDKADLRLIYLALAHMIKFRGHFLIEGDLNPDNSDVDKLFIQLVQTYNQLFEENPINASGVDAKAILSARLSKSRRLENLIAQLPGEKKNGLFGNLIALSLGLTPNFKSNFDLAEDAKLQLSKDTYDDDLDNLLAQIGDQYADLFLAAKNLSDAILLSDILRVNTEITKAPLSASMIKRYDEHHQDLTLLKALVRQQLPEKYKEIFFDQSKNGYAGYIDGGASQEEFYKFIKPILEKMDGTEELLVKLNREDLLRKQRTFDNGSIPHQIHLGELHAILRRQEDFYPFLKDNREKIEKILTFRIPYYVGPLARGNSRFAWMTRKSEETITPWNFEEVVDKGASAQSFIERMTNFDKNLPNEKVLPKHSLLYEYFTVYNELTKVKYVTEGMRKPAFLSGEQKKAIVDLLFKTNRKVTVKQLKEDYFKKIECFDSVEISGVEDRFNASLGTYHDLLKIIKDKDFLDNEENEDILEDIVLTLTLFEDREMIEERLKTYAHLFDDKVMKQLKRRRYTGWGRLSRKLINGIRDKQSGKTILDFLKSDGFANRNFMQLIHDDSLTFKEDIQKAQVSGQGDSLHEHIANLAGSPAIKKGILQTVKVVDELVKVMGRHKPENIVIEMARENQTTQKGQKNSRERMKRIEEGIKELGSQILKEHPVENTQLQNEKLYLYYLQNGRDMYVDQELDINRLSDYDVDHIVPQSFLKDDSIDNKVLTRSDKARGKSDNVPSEEVVKKMKNYWRQLLNAKLITQRKFDNLTKAERGGLSELDKAGFIKRQLVETRQITKHVAQILDSRMNTKYDENDKLIREVKVITLKSKLVSDFRKDFQFYKVREINNYHHAHDAYLNAVVGTALIKKYPKLESEFVYGDYKVYDVRKMIAKSEQEIGKATAKYFFYSNIMNFFKTEITLANGEIRKRPLIETNGETGEIVWDKGRDFATVRKVLSMPQVNIVKKTEVQTGGFSKESILPKRNSDKLIARKKDWDPKKYGGFDSPTVAYSVLVVAKVEKGKSKKLKSVKELLGITIMERSSFEKNPIDFLEAKGYKEVKKDLIIKLPKYSLFELENGRKRMLASAGELQKGNELALPSKYVNFLYLASHYEKLKGSPEDNEQKQLFVEQHKHYLDEIIEQISEFSKRVILADANLDKVLSAYNKHRDKPIREQAENIIHLFTLTNLGAPAAFKYFDTTIDRKRYTSTKEVLDATLIHQSITGLYETRIDLSQLGGDGGGGGGSSEAAAKGGTLQLDDEYRLYSPLVKPDQNIQFWLEQFPQAWAETAGMGLAKQVPPQVIQLKASATPVSVRQYPLSKEAQEGIRPHVQRLIQQGILVPVQSPWNTPLLPVRKPGTNDYRPVQDLREVNKRVQDIHPTVPNPYNLLCALPPQRSWYTVLDLKDAFFCLRLHPTSQPLFAFEWRDPGTGRTGQLTWTRLPQGFKNSPTIFDEALHRDLANFRIQHPQVTLLQYVDDLLLAGATKQDCLEGTKALLLELSDLGYRASAKKAQICRREVTYLGYSLRDGQRWLTEARKKTVVQIPAPTTAKQVREFLGTAGFCRLWIPGFATLAAPLYPLTKEKGEFSWAPEHQKAFDAIKKALLSAPALALPDVTKPFTLYVDERKGVARGVLTQTLGPWRRPVAYLSKKLDPVASGWPVCLKAIAAVAILVKDADKLTLGQNITVIAPHALENIVRQPPDRWMTNARMTHYQSLLLTERVTFAPPAALNPATLLPEETDEPVTHDCHQLLIEETGVRKDLTDIPLTGEVLTWFTDGSSYVVEGKRMAGAAVVDGTRTIWASSLPEGTSAQKAELMALTQALRLAEGKSINIYTDSRYAFATAHVHGAIYKQRGLLTSAGREIKNKEEILSLLEALHLPKRLAIIHCPGHQKAKDPISRGNQMADRVAKQAAQGVNLLAGKRTADGSEFEKRTADGSEFESPKKKAKVE

SEQ ID NO: 7281 - protein, 2094 aa, synthetic construct
MPAAKRVKLDGGDKKYSIGLDIGTNSVGWAVITDEYKVPSKKFKVLGNTDRHSIKKNLIGALLFDSGETAEATRLKRTARRRYTRRKNRICYLQEIFSNEMAKVDDSFFHRLEESFLVEEDKKHERHPIFGNIVDEVAYHEKYPTIYHLRKKLVDSTDKADLRLIYLALAHMIKFRGHFLIEGDLNPDNSDVDKLFIQLVQTYNQLFEENPINASGVDAKAILSARLSKSRRLENLIAQLPGEKKNGLFGNLIALSLGLTPNFKSNFDLAEDAKLQLSKDTYDDDLDNLLAQIGDQYADLFLAAKNLSDAILLSDILRVNTEITKAPLSASMIKRYDEHHQDLTLLKALVRQQLPEKYKEIFFDQSKNGYAGYIDGGASQEEFYKFIKPILEKMDGTEELLVKLNREDLLRKQRTFDNGSIPHQIHLGELHAILRRQEDFYPFLKDNREKIEKILTFRIPYYVGPLARGNSRFAWMTRKSEETITPWNFEEVVDKGASAQSFIERMTNFDKNLPNEKVLPKHSLLYEYFTVYNELTKVKYVTEGMRKPAFLSGEQKKAIVDLLFKTNRKVTVKQLKEDYFKKIECFDSVEISGVEDRFNASLGTYHDLLKIIKDKDFLDNEENEDILEDIVLTLTLFEDREMIEERLKTYAHLFDDKVMKQLKRRRYTGWGRLSRKLINGIRDKQSGKTILDFLKSDGFANRNFMQLIHDDSLTFKEDIQKAQVSGQGDSLHEHIANLAGSPAIKKGILQTVKVVDELVKVMGRHKPENIVIEMARENQTTQKGQKNSRERMKRIEEGIKELGSQILKEHPVENTQLQNEKLYLYYLQNGRDMYVDQELDINRLSDYDVDHIVPQSFLKDDSIDNKVLTRSDKARGKSDNVPSEEVVKKMKNYWRQLLNAKLITQRKFDNLTKAERGGLSELDKAGFIKRQLVETRQITKHVAQILDSRMNTKYDENDKLIREVKVITLKSKLVSDFRKDFQFYKVREINNYHHAHDAYLNAVVGTALIKKYPKLESEFVYGDYKVYDVRKMIAKSEQEIGKATAKYFFYSNIMNFFKTEITLANGEIRKRPLIETNGETGEIVWDKGRDFATVRKVLSMPQVNIVKKTEVQTGGFSKESILPKRNSDKLIARKKDWDPKKYGGFDSPTVAYSVLVVAKVEKGKSKKLKSVKELLGITIMERSSFEKNPIDFLEAKGYKEVKKDLIIKLPKYSLFELENGRKRMLASAGELQKGNELALPSKYVNFLYLASHYEKLKGSPEDNEQKQLFVEQHKHYLDEIIEQISEFSKRVILADANLDKVLSAYNKHRDKPIREQAENIIHLFTLTNLGAPAAFKYFDTTIDRKRYTSTKEVLDATLIHQSITGLYETRIDLSQLGGDGGGGGGSSEAAAKGGVLNLEEEYRLHEKPVPSSIDPSWLQLFPTVWAERAGMGLANQVPPVVVELRSGASPVAVRQYPMSKEAREGIRPHIQRFLDLGVLVPCQSPWNTPLLPVKKPGTNDYRPVQDLREINKRVQDIHPTVPNPYNLLSSLPPSHTWYSVLDLKDAFFCLKLHPNSQPLFAFEWRDPEKGNTGQLTWTRLPQGFKNSPTLFNEALHRDLAPFRALNPQVVLLQYVDDLLVAAPTYRDCKEGTQKLLQELSKLGYRVSAKKAQLCQKEVTYLGYLLKEGKRWLTPARKATVMKIPPPTTPRQVREFLGKAGFCRLFIPGFASLAAPLYPLTKPSIPFIWTEEHQKAFDRIKEALLSAPALALPDLTKPFTLYVDERAGVARGVLTQTLGPWRRPVAYLSKKLDPVASGWPTCLKAVAAVALLLKDADKLTLGQNVTVIASHSLESIVRQPPDRWMTNARMTHYQSLLLNERVSFAPPAVLNPATLLPVESEATPVHRCSEILAEETGTRRDLKDQPLPGVPAWYTDGSSFIAEGKRRAGAAIVDGKRTVWASSLPEGTSAQKAELVALTQALRLAEGKDINIYTDSRYAFATAHIHGAIYKQRGWLTSAGKDIKNKEEILALLEAIHLPKRVAIIHCPGHQKGNDPVATGNRRADEAAKQAALSTRVLAETTKPAGKRTADGSEFEKRTADGSEFESPKKKAKVE

SEQ ID NO: 7282 - protein, 2096 aa, synthetic construct
MPAAKRVKLDGGDKKYSIGLDIGTNSVGWAVITDEYKVPSKKFKVLGNTDRHSIKKNLIGALLFDSGETAEATRLKRTARRRYTRRKNRICYLQEIFSNEMAKVDDSFFHRLEESFLVEEDKKHERHPIFGNIVDEVAYHEKYPTIYHLRKKLVDSTDKADLRLIYLALAHMIKFRGHFLIEGDLNPDNSDVDKLFIQLVQTYNQLFEENPINASGVDAKAILSARLSKSRRLENLIAQLPGEKKNGLFGNLIALSLGLTPNFKSNFDLAEDAKLQLSKDTYDDDLDNLLAQIGDQYADLFLAAKNLSDAILLSDILRVNTEITKAPLSASMIKRYDEHHQDLTLLKALVRQQLPEKYKEIFFDQSKNGYAGYIDGGASQEEFYKFIKPILEKMDGTEELLVKLNREDLLRKQRTFDNGSIPHQIHLGELHAILRRQEDFYPFLKDNREKIEKILTFRIPYYVGPLARGNSRFAWMTRKSEETITPWNFEEVVDKGASAQSFIERMTNFDKNLPNEKVLPKHSLLYEYFTVYNELTKVKYVTEGMRKPAFLSGEQKKAIVDLLFKTNRKVTVKQLKEDYFKKIECFDSVEISGVEDRFNASLGTYHDLLKIIKDKDFLDNEENEDILEDIVLTLTLFEDREMIEERLKTYAHLFDDKVMKQLKRRRYTGWGRLSRKLINGIRDKQSGKTILDFLKSDGFANRNFMQLIHDDSLTFKEDIQKAQVSGQGDSLHEHIANLAGSPAIKKGILQTVKVVDELVKVMGRHKPENIVIEMARENQTTQKGQKNSRERMKRIEEGIKELGSQILKEHPVENTQLQNEKLYLYYLQNGRDMYVDQELDINRLSDYDVDHIVPQSFLKDDSIDNKVLTRSDKARGKSDNVPSEEVVKKMKNYWRQLLNAKLITQRKFDNLTKAERGGLSELDKAGFIKRQLVETRQITKHVAQILDSRMNTKYDENDKLIREVKVITLKSKLVSDFRKDFQFYKVREINNYHHAHDAYLNAVVGTALIKKYPKLESEFVYGDYKVYDVRKMIAKSEQEIGKATAKYFFYSNIMNFFKTEITLANGEIRKRPLIETNGETGEIVWDKGRDFATVRKVLSMPQVNIVKKTEVQTGGFSKESILPKRNSDKLIARKKDWDPKKYGGFDSPTVAYSVLVVAKVEKGKSKKLKSVKELLGITIMERSSFEKNPIDFLEAKGYKEVKKDLIIKLPKYSLFELENGRKRMLASAGELQKGNELALPSKYVNFLYLASHYEKLKGSPEDNEQKQLFVEQHKHYLDEIIEQISEFSKRVILADANLDKVLSAYNKHRDKPIREQAENIIHLFTLTNLGAPAAFKYFDTTIDRKRYTSTKEVLDATLIHQSITGLYETRIDLSQLGGDGGGGGGSSEAAAKGGTLNIEDEYRLHETSKEPDVPLGSTWLSDFPQAWAETGGMGLAVRQAPLIIPLKATSTPVSIKQYPMSQEARLGIKPHIQRLLDQGILVPCQSPWNTPLLPVKKPGTNDYRPVQDLREVNKRVEDIHPTVPNPYNLLSGLPPSHQWYTVLDLKDAFFCLRLHPTSQPLFAFEWRDPEMGISGQLTWTRLPQGFKNSPTLFNEALHRDLADFRIQHPDLILLQYVDDLLLAATSEQDCQRGTRALLQTLGNLGYRASAKKAQICQKQVKYLGYLLKEGQRWLTEARKETVMGQPTPKTPRQLREFLGTAGFCRLWIPGFAEMAAPLYPLTKPGTLFNWGPDQQKAYQEIKQALLTAPALGLPDLTKPFELFVDEKQGYAKGVLTQKLGPWRRPVAYLSKKLDPVAAGWPPCLRMVAAIAVLTKDAGKLTMGQPLVILAPHAVEALVKQPPDRWLSNARMTHYQAMLLDTDRVQFGPVVALNPATLLPLPEKEAPHDCLEILAETHGTRPDLTDQPIPDADYTWYTDGSSFLQEGQRRAGAAVTTETEVIWARALPAGTSAQRAELIALTQALKMAEGKKLNVYTDSRYAFATAHVHGEIYRRRGWLTSEGREIKNKNEILALLKALFLPKRLSIIHCPGHQKGNSAEARGNRMADQAAREAAMKAVLETSTLLAGKRTADGSEFEKRTADGSEFESPKKKAKVE

SEQ ID NO: 7283 - protein, 2173 aa, synthetic construct
MPAAKRVKLDGGDKKYSIGLDIGTNSVGWAVITDEYKVPSKKFKVLGNTDRHSIKKNLIGALLFDSGETAEATRLKRTARRRYTRRKNRICYLQEIFSNEMAKVDDSFFHRLEESFLVEEDKKHERHPIFGNIVDEVAYHEKYPTIYHLRKKLVDSTDKADLRLIYLALAHMIKFRGHFLIEGDLNPDNSDVDKLFIQLVQTYNQLFEENPINASGVDAKAILSARLSKSRRLENLIAQLPGEKKNGLFGNLIALSLGLTPNFKSNFDLAEDAKLQLSKDTYDDDLDNLLAQIGDQYADLFLAAKNLSDAILLSDILRVNTEITKAPLSASMIKRYDEHHQDLTLLKALVRQQLPEKYKEIFFDQSKNGYAGYIDGGASQEEFYKFIKPILEKMDGTEELLVKLNREDLLRKQRTFDNGSIPHQIHLGELHAILRRQEDFYPFLKDNREKIEKILTFRIPYYVGPLARGNSRFAWMTRKSEETITPWNFEEVVDKGASAQSFIERMTNFDKNLPNEKVLPKHSLLYEYFTVYNELTKVKYVTEGMRKPAFLSGEQKKAIVDLLFKTNRKVTVKQLKEDYFKKIECFDSVEISGVEDRFNASLGTYHDLLKIIKDKDFLDNEENEDILEDIVLTLTLFEDREMIEERLKTYAHLFDDKVMKQLKRRRYTGWGRLSRKLINGIRDKQSGKTILDFLKSDGFANRNFMQLIHDDSLTFKEDIQKAQVSGQGDSLHEHIANLAGSPAIKKGILQTVKVVDELVKVMGRHKPENIVIEMARENQTTQKGQKNSRERMKRIEEGIKELGSQILKEHPVENTQLQNEKLYLYYLQNGRDMYVDQELDINRLSDYDVDHIVPQSFLKDDSIDNKVLTRSDKARGKSDNVPSEEVVKKMKNYWRQLLNAKLITQRKFDNLTKAERGGLSELDKAGFIKRQLVETRQITKHVAQILDSRMNTKYDENDKLIREVKVITLKSKLVSDFRKDFQFYKVREINNYHHAHDAYLNAVVGTALIKKYPKLESEFVYGDYKVYDVRKMIAKSEQEIGKATAKYFFYSNIMNFFKTEITLANGEIRKRPLIETNGETGEIVWDKGRDFATVRKVLSMPQVNIVKKTEVQTGGFSKESILPKRNSDKLIARKKDWDPKKYGGFDSPTVAYSVLVVAKVEKGKSKKLKSVKELLGITIMERSSFEKNPIDFLEAKGYKEVKKDLIIKLPKYSLFELENGRKRMLASAGELQKGNELALPSKYVNFLYLASHYEKLKGSPEDNEQKQLFVEQHKHYLDEIIEQISEFSKRVILADANLDKVLSAYNKHRDKPIREQAENIIHLFTLTNLGAPAAFKYFDTTIDRKRYTSTKEVLDATLIHQSITGLYETRIDLSQLGGDGGGGGEAAAKGSSGGMDLLKPLTVERKGVKIKGYWNSQADITCVPKDLLQGEEPVRQQNVTTIHGTQEGDVYYVNLKIDGRRINTEVIGTTLDYAIITPGDVPWILKKPLELTIKLDLEEQQGTLLNNSILSKKGKEELKQLFEKYSALWQSWENQVGHRRIRPHKIATGTVKPTPQKQYHINPKAKPDIQIVINDLLKQGVLIQKESTMNTPVYPVPKPNGRWRMVLDYRAVNKVTPLIAVQNQHSYGILGSLFKGRYKTTIDLSNGFWAHPIVPEDYWITAFTWQGKQYCWTVLPQGFLNSPGLFNGDVVDLLQGIPNVEVYVDDVYISHDSEKEHLEYLDILFNRLKEAGYIISLKKSNIANSIVDFLGFQITNEGRGLTDTFKEKLENITAPTTLKQLQSILGKLNFARNFIPDFTELIAPLYALIPKSPKNYVPWQIEHSTTLETLITKLNGAEYLQGRKGDKTLIMKVNASYTTGYIRYYNEGEKKPISYVSIVFSKTELKFTELEKLLTTVHKGLLKALDLSMGQNIHVYSPIVSMQNIQKTPQTAKKALASRWLSWLSYLEDPRIRFFYDPQMPALKDLPAVDTGKDNKKHPSNFQHIFYTDGSAITSPTKEGHLNAGMGIVYFINKDGNLQKQQEWSISLGNHTAQFAEIAAFEFALKKCLPLGGNILVVTDSNYVAKAYNEELDVWASNGFVNNRKKPLKHISKWKSVADLKRLRPDVVVTHEPGHQKLDSSPHAYGNNLADQLATQASFKVHAGKRTADGSEFEKRTADGSEFESPKKKAKVE

SEQ ID NO: 7284 - protein, 2095 aa, synthetic construct
MPAAKRVKLDGGDKKYSIGLDIGTNSVGWAVITDEYKVPSKKFKVLGNTDRHSIKKNLIGALLFDSGETAEATRLKRTARRRYTRRKNRICYLQEIFSNEMAKVDDSFFHRLEESFLVEEDKKHERHPIFGNIVDEVAYHEKYPTIYHLRKKLVDSTDKADLRLIYLALAHMIKFRGHFLIEGDLNPDNSDVDKLFIQLVQTYNQLFEENPINASGVDAKAILSARLSKSRRLENLIAQLPGEKKNGLFGNLIALSLGLTPNFKSNFDLAEDAKLQLSKDTYDDDLDNLLAQIGDQYADLFLAAKNLSDAILLSDILRVNTEITKAPLSASMIKRYDEHHQDLTLLKALVRQQLPEKYKEIFFDQSKNGYAGYIDGGASQEEFYKFIKPILEKMDGTEELLVKLNREDLLRKQRTFDNGSIPHQIHLGELHAILRRQEDFYPFLKDNREKIEKILTFRIPYYVGPLARGNSRFAWMTRKSEETITPWNFEEVVDKGASAQSFIERMTNFDKNLPNEKVLPKHSLLYEYFTVYNELTKVKYVTEGMRKPAFLSGEQKKAIVDLLFKTNRKVTVKQLKEDYFKKIECFDSVEISGVEDRFNASLGTYHDLLKIIKDKDFLDNEENEDILEDIVLTLTLFEDREMIEERLKTYAHLFDDKVMKQLKRRRYTGWGRLSRKLINGIRDKQSGKTILDFLKSDGFANRNFMQLIHDDSLTFKEDIQKAQVSGQGDSLHEHIANLAGSPAIKKGILQTVKVVDELVKVMGRHKPENIVIEMARENQTTQKGQKNSRERMKRIEEGIKELGSQILKEHPVENTQLQNEKLYLYYLQNGRDMYVDQELDINRLSDYDVDHIVPQSFLKDDSIDNKVLTRSDKARGKSDNVPSEEVVKKMKNYWRQLLNAKLITQRKFDNLTKAERGGLSELDKAGFIKRQLVETRQITKHVAQILDSRMNTKYDENDKLIREVKVITLKSKLVSDFRKDFQFYKVREINNYHHAHDAYLNAVVGTALIKKYPKLESEFVYGDYKVYDVRKMIAKSEQEIGKATAKYFFYSNIMNFFKTEITLANGEIRKRPLIETNGETGEIVWDKGRDFATVRKVLSMPQVNIVKKTEVQTGGFSKESILPKRNSDKLIARKKDWDPKKYGGFDSPTVAYSVLVVAKVEKGKSKKLKSVKELLGITIMERSSFEKNPIDFLEAKGYKEVKKDLIIKLPKYSLFELENGRKRMLASAGELQKGNELALPSKYVNFLYLASHYEKLKGSPEDNEQKQLFVEQHKHYLDEIIEQISEFSKRVILADANLDKVLSAYNKHRDKPIREQAENIIHLFTLTNLGAPAAFKYFDTTIDRKRYTSTKEVLDATLIHQSITGLYETRIDLSQLGGDGGGGGEAAAKGSSGGTLQLEEEYRLFEPESTQKQEMDIWLKNFPQAWAETGGMGTAHCQAPVLIQLKATATPISIRQYPMPHEAYQGIKPHIRRMLDQGILKPCQSPWNTPLLPVKKPGTEDYRPVQDLREVNKRVEDIHPTVPNPYNLLSTLPPSHPWYTVLDLKDAFFCLRLHSESQLLFAFEWRDPEIGLSGQLTWTRLPQGFKNSPTLFNEALHSDLADFRVRYPALVLLQYVDDLLLAAATRTECLEGTKALLETLGNKGYRASAKKAQICLQEVTYLGYSLKDGQRWLTKARKEAILSIPVPKNSRQVREFLGKAGYCRLFIPGFAELAAPLYPLTRPGTLFQWGTEQQLAFEDIKKALLSSPALGLPDITKPFELFIDENSGFAKGVLVQKLGPWKRPVAYLSKKLDTVASGWPPCLRMVAAIAILVKDAGKLTLGQPLTILTSHPVEALVRQPPNKWLSNARMTHYQAMLLDAERVHFGPTVSLNPATLLPLPSGGNHHDCLQILAETHGTRPDLTDQPLPDADLTWYTDGSSFIRNGEREAGAAVTTESEVIWAAPLPPGTSAQRAELIALTQALKMAEGKKLTVYTDSRYAFATTHVHGEIYRRRGWLTSEGKEIKNKNEILALLEALFLPKRLSIIHCPGHQKGDSPQAKGNRLADDTAKKAATETHSSLTVLPAGKRTADGSEFEKRTADGSEFESPKKKAKVE

SEQ ID NO: 7285 - protein, 2176 aa, synthetic construct
MPAAKRVKLDGGDKKYSIGLDIGTNSVGWAVITDEYKVPSKKFKVLGNTDRHSIKKNLIGALLFDSGETAEATRLKRTARRRYTRRKNRICYLQEIFSNEMAKVDDSFFHRLEESFLVEEDKKHERHPIFGNIVDEVAYHEKYPTIYHLRKKLVDSTDKADLRLIYLALAHMIKFRGHFLIEGDLNPDNSDVDKLFIQLVQTYNQLFEENPINASGVDAKAILSARLSKSRRLENLIAQLPGEKKNGLFGNLIALSLGLTPNFKSNFDLAEDAKLQLSKDTYDDDLDNLLAQIGDQYADLFLAAKNLSDAILLSDILRVNTEITKAPLSASMIKRYDEHHQDLTLLKALVRQQLPEKYKEIFFDQSKNGYAGYIDGGASQEEFYKFIKPILEKMDGTEELLVKLNREDLLRKQRTFDNGSIPHQIHLGELHAILRRQEDFYPFLKDNREKIEKILTFRIPYYVGPLARGNSRFAWMTRKSEETITPWNFEEVVDKGASAQSFIERMTNFDKNLPNEKVLPKHSLLYEYFTVYNELTKVKYVTEGMRKPAFLSGEQKKAIVDLLFKTNRKVTVKQLKEDYFKKIECFDSVEISGVEDRFNASLGTYHDLLKIIKDKDFLDNEENEDILEDIVLTLTLFEDREMIEERLKTYAHLFDDKVMKQLKRRRYTGWGRLSRKLINGIRDKQSGKTILDFLKSDGFANRNFMQLIHDDSLTFKEDIQKAQVSGQGDSLHEHIANLAGSPAIKKGILQTVKVVDELVKVMGRHKPENIVIEMARENQTTQKGQKNSRERMKRIEEGIKELGSQILKEHPVENTQLQNEKLYLYYLQNGRDMYVDQELDINRLSDYDVDHIVPQSFLKDDSIDNKVLTRSDKARGKSDNVPSEEVVKKMKNYWRQLLNAKLITQRKFDNLTKAERGGLSELDKAGFIKRQLVETRQITKHVAQILDSRMNTKYDENDKLIREVKVITLKSKLVSDFRKDFQFYKVREINNYHHAHDAYLNAVVGTALIKKYPKLESEFVYGDYKVYDVRKMIAKSEQEIGKATAKYFFYSNIMNFFKTEITLANGEIRKRPLIETNGETGEIVWDKGRDFATVRKVLSMPQVNIVKKTEVQTGGFSKESILPKRNSDKLIARKKDWDPKKYGGFDSPTVAYSVLVVAKVEKGKSKKLKSVKELLGITIMERSSFEKNPIDFLEAKGYKEVKKDLIIKLPKYSLFELENGRKRMLASAGELQKGNELALPSKYVNFLYLASHYEKLKGSPEDNEQKQLFVEQHKHYLDEIIEQISEFSKRVILADANLDKVLSAYNKHRDKPIREQAENIIHLFTLTNLGAPAAFKYFDTTIDRKRYTSTKEVLDATLIHQSITGLYETRIDLSQLGGDGGGGGEAAAKGSSGGMNPLQLLQPLPAEIKGTKLLAHWNSGATITCIPESFLEDEQPIKKTLIKTIHGEKQQNVYYVTFKVKGRKVEAEVIASPYEYILLSPTDVPWLTQQPLQLTILVPLQEYQEKILSKTALPEDQKQQLKTLFVKYDNLWQHWENQVGHRKIRPHNIATGDYPPRPQKQYPINPKAKPSIQIVIDDLLKQGVLTPQNSTMNTPVYPVPKPDGRWRMVLDYREVNKTIPLTAAQNQHSAGILATIVRQKYKTTLDLANGFWAHPITPESYWLTAFTWQGKQYCWTRLPQGFLNSPALFTADVVDLLKEIPNVQVYVDDIYLSHDDPKEHVQQLEKVFQILLQAGYVVSLKKSEIGQKTVEFLGFNITKEGRGLTDTFKTKLLNITPPKDLKQLQSILGLLNFARNFIPNFAELVQPLYNLIASAKGKYIEWSEENTKQLNMVIEALNTASNLEERLPEQRLVIKVNTSPSAGYVRYYNETGKKPIMYLNYVFSKAELKFSMLEKLLTTMHKALIKAMDLAMGQEILVYSPIVSMTKIQKTPLPERKALPIRWITWMTYLEDPRIQFHYDKTLPELKHIPDVYTSSQSPVKHPSQYEGVFYTDGSAIKSPDPTKSNNAGMGIVHATYKPEYQVLNQWSIPLGNHTAQMAEIAAVEFACKKALKIPGPVLVITDSFYVAESANKELPYWKSNGFVNNKKKPLKHISKWKSIAECLSMKPDITIQHEKGISLQIPVFILKGNALADKLATQGSYVVNAGKRTADGSEFEKRTADGSEFESPKKKAKVE

SEQ ID NO: 7286 - protein, 2127 aa, synthetic construct
MPAAKRVKLDGGDKKYSIGLDIGTNSVGWAVITDEYKVPSKKFKVLGNTDRHSIKKNLIGALLFDSGETAEATRLKRTARRRYTRRKNRICYLQEIFSNEMAKVDDSFFHRLEESFLVEEDKKHERHPIFGNIVDEVAYHEKYPTIYHLRKKLVDSTDKADLRLIYLALAHMIKFRGHFLIEGDLNPDNSDVDKLFIQLVQTYNQLFEENPINASGVDAKAILSARLSKSRRLENLIAQLPGEKKNGLFGNLIALSLGLTPNFKSNFDLAEDAKLQLSKDTYDDDLDNLLAQIGDQYADLFLAAKNLSDAILLSDILRVNTEITKAPLSASMIKRYDEHHQDLTLLKALVRQQLPEKYKEIFFDQSKNGYAGYIDGGASQEEFYKFIKPILEKMDGTEELLVKLNREDLLRKQRTFDNGSIPHQIHLGELHAILRRQEDFYPFLKDNREKIEKILTFRIPYYVGPLARGNSRFAWMTRKSEETITPWNFEEVVDKGASAQSFIERMTNFDKNLPNEKVLPKHSLLYEYFTVYNELTKVKYVTEGMRKPAFLSGEQKKAIVDLLFKTNRKVTVKQLKEDYFKKIECFDSVEISGVEDRFNASLGTYHDLLKIIKDKDFLDNEENEDILEDIVLTLTLFEDREMIEERLKTYAHLFDDKVMKQLKRRRYTGWGRLSRKLINGIRDKQSGKTILDFLKSDGFANRNFMQLIHDDSLTFKEDIQKAQVSGQGDSLHEHIANLAGSPAIKKGILQTVKVVDELVKVMGRHKPENIVIEMARENQTTQKGQKNSRERMKRIEEGIKELGSQILKEHPVENTQLQNEKLYLYYLQNGRDMYVDQELDINRLSDYDVDHIVPQSFLKDDSIDNKVLTRSDKARGKSDNVPSEEVVKKMKNYWRQLLNAKLITQRKFDNLTKAERGGLSELDKAGFIKRQLVETRQITKHVAQILDSRMNTKYDENDKLIREVKVITLKSKLVSDFRKDFQFYKVREINNYHHAHDAYLNAVVGTALIKKYPKLESEFVYGDYKVYDVRKMIAKSEQEIGKATAKYFFYSNIMNFFKTEITLANGEIRKRPLIETNGETGEIVWDKGRDFATVRKVLSMPQVNIVKKTEVQTGGFSKESILPKRNSDKLIARKKDWDPKKYGGFDSPTVAYSVLVVAKVEKGKSKKLKSVKELLGITIMERSSFEKNPIDFLEAKGYKEVKKDLIIKLPKYSLFELENGRKRMLASAGELQKGNELALPSKYVNFLYLASHYEKLKGSPEDNEQKQLFVEQHKHYLDEIIEQISEFSKRVILADANLDKVLSAYNKHRDKPIREQAENIIHLFTLTNLGAPAAFKYFDTTIDRKRYTSTKEVLDATLIHQSITGLYETRIDLSQLGGDGGGGGEAAAKGSSGGLLGRDLLTKLKAQIQFSTEGPQVTWEDRPAMCLVLNLEEEYRLHEKPVPPSIDPSWLQLFPMVWAEKAGMGLANQVPPVVVELKSDASPVAVRQYPMSKEAREGIRPHIQRFLDLGILVPCQSPWNTPLLPVKKPGTNDYRPVQDLREVNKRVQDIHPTVPNPYNLLSSLPPSHTWYSVLDLKDAFFCLKLHPNSQPLFAFEWRDPEKGNTGQLTWTRLPQGFKNSPTLFNEALHRDLASFRALNPQVVMLQYVDDLLVAAPTYRDCKEGTRRLLQELSKLGYRVSAKKAQLCREEVTYLGYLLKGGKRWLTPARKATVMKIPTPTTPRQVREFLGTAGFCRLWIPGFASLAAPLYPLTRPKVPFTWTEAHQEAFGRIKEALLSAPALALPDLTKPFALYVDEKEGVARGVLTQTLGPWRRPVAYLSKKLDPVASGWPTCLKAIAAVALLLKDADKLTLGQNVLVIAPHNLESIVRQPPDRWMTNARMTHYQSLLLNERVSFAPPAILNPATLLPVESDDTPIHICSEILAEETGTRPDLRDQPLPGVPAWYTDGSSFIMDGRRQAGAAIVDNKRTVWASNLPEGTSAQKAELIALTQALRLAEGKSINIYTDSRYAFATAHVHGAIYKQRGWLTSAGKDIKNKEEILALLEAIHLPKRVAIIHCPGHQRGTDPVATGNRKADEAAKQAAQSTRILTETTKNAGKRTADGSEFEKRTADGSEFESPKKKAKVE

SEQ ID NO: 7287 - protein, 2218 aa, synthetic construct
MPAAKRVKLDGGDKKYSIGLDIGTNSVGWAVITDEYKVPSKKFKVLGNTDRHSIKKNLIGALLFDSGETAEATRLKRTARRRYTRRKNRICYLQEIFSNEMAKVDDSFFHRLEESFLVEEDKKHERHPIFGNIVDEVAYHEKYPTIYHLRKKLVDSTDKADLRLIYLALAHMIKFRGHFLIEGDLNPDNSDVDKLFIQLVQTYNQLFEENPINASGVDAKAILSARLSKSRRLENLIAQLPGEKKNGLFGNLIALSLGLTPNFKSNFDLAEDAKLQLSKDTYDDDLDNLLAQIGDQYADLFLAAKNLSDAILLSDILRVNTEITKAPLSASMIKRYDEHHQDLTLLKALVRQQLPEKYKEIFFDQSKNGYAGYIDGGASQEEFYKFIKPILEKMDGTEELLVKLNREDLLRKQRTFDNGSIPHQIHLGELHAILRRQEDFYPFLKDNREKIEKILTFRIPYYVGPLARGNSRFAWMTRKSEETITPWNFEEVVDKGASAQSFIERMTNFDKNLPNEKVLPKHSLLYEYFTVYNELTKVKYVTEGMRKPAFLSGEQKKAIVDLLFKTNRKVTVKQLKEDYFKKIECFDSVEISGVEDRFNASLGTYHDLLKIIKDKDFLDNEENEDILEDIVLTLTLFEDREMIEERLKTYAHLFDDKVMKQLKRRRYTGWGRLSRKLINGIRDKQSGKTILDFLKSDGFANRNFMQLIHDDSLTFKEDIQKAQVSGQGDSLHEHIANLAGSPAIKKGILQTVKVVDELVKVMGRHKPENIVIEMARENQTTQKGQKNSRERMKRIEEGIKELGSQILKEHPVENTQLQNEKLYLYYLQNGRDMYVDQELDINRLSDYDVDHIVPQSFLKDDSIDNKVLTRSDKARGKSDNVPSEEVVKKMKNYWRQLLNAKLITQRKFDNLTKAERGGLSELDKAGFIKRQLVETRQITKHVAQILDSRMNTKYDENDKLIREVKVITLKSKLVSDFRKDFQFYKVREINNYHHAHDAYLNAVVGTALIKKYPKLESEFVYGDYKVYDVRKMIAKSEQEIGKATAKYFFYSNIMNFFKTEITLANGEIRKRPLIETNGETGEIVWDKGRDFATVRKVLSMPQVNIVKKTEVQTGGFSKESILPKRNSDKLIARKKDWDPKKYGGFDSPTVAYSVLVVAKVEKGKSKKLKSVKELLGITIMERSSFEKNPIDFLEAKGYKEVKKDLIIKLPKYSLFELENGRKRMLASAGELQKGNELALPSKYVNFLYLASHYEKLKGSPEDNEQKQLFVEQHKHYLDEIIEQISEFSKRVILADANLDKVLSAYNKHRDKPIREQAENIIHLFTLTNLGAPAAFKYFDTTIDRKRYTSTKEVLDATLIHQSITGLYETRIDLSQLGGDGGGGGEAAAKGSSGGTLGDQGSRGSDPLPEPRVTLTVEGIPTEFLVNTGAEHSVLTKPMGKMGSKRTVVAGATGSKVYPWTTKRLLKIGQKQVTHSFLVIPECPAPLLGRDLLTKLKAQIQFSTEGPQVTWEDRPAMCLVLNLEEEYRLHEKPVPPSIDPSWLQLFPMVWAEKAGMGLANQVPPVVVELKSDASPVAVRQYPMSKEAREGIRPHIQRFLDLGILVPCQSPWNTPLLPVKKPGTNDYRPVQDLREVNKRVQDIHPTVPNPYNLLSSLPPSHTWYSVLDLKDAFFCLKLHPNSQPLFAFEWRDPEKGNTGQLTWTRLPQGFKNSPTLFNEALHRDLASFRALNPQVVMLQYVDDLLVAAPTYRDCKEGTRRLLQELSKLGYRVSAKKAQLCREEVTYLGYLLKGGKRWLTPARKATVMKIPTPTTPRQVREFLGTAGFCRLWIPGFASLAAPLYPLTRPKVPFTWTEAHQEAFGRIKEALLSAPALALPDLTKPFALYVDEKEGVARGVLTQTLGPWRRPVAYLSKKLDPVASGWPTCLKAIAAVALLLKDADKLTLGQNVLVIAPHNLESIVRQPPDRWMTNARMTHYQSLLLNERVSFAPPAILNPATLLPVESDDTPIHICSEILAEETGTRPDLRDQPLPGVPAWYTDGSSFIMDGRRQAGAAIVDNKRTVWASNLPEGTSAQKAELIALTQALRLAEGKSINIYTDSRYAFATAHVHGAIYKQRGWLTSAGKDIKNKEEILALLEAIHLPKRVAIIHCPGHQRGTDPVATGNRKADEAAKQAAQSTRILTETTKNAGKRTADGSEFEKRTADGSEFESPKKKAKVE

SEQ ID NO: 7288 - protein, 2096 aa, synthetic construct
MPAAKRVKLDGGDKKYSIGLDIGTNSVGWAVITDEYKVPSKKFKVLGNTDRHSIKKNLIGALLFDSGETAEATRLKRTARRRYTRRKNRICYLQEIFSNEMAKVDDSFFHRLEESFLVEEDKKHERHPIFGNIVDEVAYHEKYPTIYHLRKKLVDSTDKADLRLIYLALAHMIKFRGHFLIEGDLNPDNSDVDKLFIQLVQTYNQLFEENPINASGVDAKAILSARLSKSRRLENLIAQLPGEKKNGLFGNLIALSLGLTPNFKSNFDLAEDAKLQLSKDTYDDDLDNLLAQIGDQYADLFLAAKNLSDAILLSDILRVNTEITKAPLSASMIKRYDEHHQDLTLLKALVRQQLPEKYKEIFFDQSKNGYAGYIDGGASQEEFYKFIKPILEKMDGTEELLVKLNREDLLRKQRTFDNGSIPHQIHLGELHAILRRQEDFYPFLKDNREKIEKILTFRIPYYVGPLARGNSRFAWMTRKSEETITPWNFEEVVDKGASAQSFIERMTNFDKNLPNEKVLPKHSLLYEYFTVYNELTKVKYVTEGMRKPAFLSGEQKKAIVDLLFKTNRKVTVKQLKEDYFKKIECFDSVEISGVEDRFNASLGTYHDLLKIIKDKDFLDNEENEDILEDIVLTLTLFEDREMIEERLKTYAHLFDDKVMKQLKRRRYTGWGRLSRKLINGIRDKQSGKTILDFLKSDGFANRNFMQLIHDDSLTFKEDIQKAQVSGQGDSLHEHIANLAGSPAIKKGILQTVKVVDELVKVMGRHKPENIVIEMARENQTTQKGQKNSRERMKRIEEGIKELGSQILKEHPVENTQLQNEKLYLYYLQNGRDMYVDQELDINRLSDYDVDHIVPQSFLKDDSIDNKVLTRSDKARGKSDNVPSEEVVKKMKNYWRQLLNAKLITQRKFDNLTKAERGGLSELDKAGFIKRQLVETRQITKHVAQILDSRMNTKYDENDKLIREVKVITLKSKLVSDFRKDFQFYKVREINNYHHAHDAYLNAVVGTALIKKYPKLESEFVYGDYKVYDVRKMIAKSEQEIGKATAKYFFYSNIMNFFKTEITLANGEIRKRPLIETNGETGEIVWDKGRDFATVRKVLSMPQVNIVKKTEVQTGGFSKESILPKRNSDKLIARKKDWDPKKYGGFDSPTVAYSVLVVAKVEKGKSKKLKSVKELLGITIMERSSFEKNPIDFLEAKGYKEVKKDLIIKLPKYSLFELENGRKRMLASAGELQKGNELALPSKYVNFLYLASHYEKLKGSPEDNEQKQLFVEQHKHYLDEIIEQISEFSKRVILADANLDKVLSAYNKHRDKPIREQAENIIHLFTLTNLGAPAAFKYFDTTIDRKRYTSTKEVLDATLIHQSITGLYETRIDLSQLGGDGGGGGEAAAKGSSGGTLNLEDEYRLYETSAEPEVSPGSTWLSDFPQAWAETGGMGLAVRQAPLIIPLKATSTPVSIKQYPMSQEAKLGIKPHIQRLLDQGILVPCQSPWNTPLLPVKKPGTNDYRPVQDLREVNKRVEDIHPTVPNPYNLLSGLPPSHRWYTVLDLKDAFFCLRLHPTSQPLFAFEWRDPGMGISGQLTWTRLPQGFKNSPTLFNEALHRDLADFRIQHPDLILLQYVDDILLAATSELDCQQGTRALLLTLGNLGYRASAKKAQLCQKQVKYLGYLLKEGQRWLTEARKETVMGQPTPKTPRQLREFLGTAGFCRLWIPGFAEMAAPLYPLTKPGTLFNWGPDQQKAYQEIKQALLTAPALGLPDLTKPFELFVDEKQGYAKGVLTQKLGPWRRPVAYLSKKLDPVAAGWPPCLRMVAAIAVLRKDAGKLTMGQPLVILAPHAVEALVKQPPDRWLSNARMTHYQAMLLDTDRVQFGPVVALNPATLLPLPEEGAPHDCLEILAETHGTRPDLTDQPIPDADHTWYTDGSSFLQEGQRKAGAAVTTETEVIWARALPAGTSAQRAELIALTQALKMAEGKRLNVYTDSRYAFATAHIHGEIYRRRGWLTSEGREIKNKSEILALLKALFLPKRLSIIHCLGHQKGDSAEARGNRLADQAAREAAIKTPPDTSTLLAGKRTADGSEFEKRTADGSEFESPKKKAKVE

SEQ ID NO: 7289 - protein, 2096 aa, synthetic construct
MPAAKRVKLDGGDKKYSIGLDIGTNSVGWAVITDEYKVPSKKFKVLGNTDRHSIKKNLIGALLFDSGETAEATRLKRTARRRYTRRKNRICYLQEIFSNEMAKVDDSFFHRLEESFLVEEDKKHERHPIFGNIVDEVAYHEKYPTIYHLRKKLVDSTDKADLRLIYLALAHMIKFRGHFLIEGDLNPDNSDVDKLFIQLVQTYNQLFEENPINASGVDAKAILSARLSKSRRLENLIAQLPGEKKNGLFGNLIALSLGLTPNFKSNFDLAEDAKLQLSKDTYDDDLDNLLAQIGDQYADLFLAAKNLSDAILLSDILRVNTEITKAPLSASMIKRYDEHHQDLTLLKALVRQQLPEKYKEIFFDQSKNGYAGYIDGGASQEEFYKFIKPILEKMDGTEELLVKLNREDLLRKQRTFDNGSIPHQIHLGELHAILRRQEDFYPFLKDNREKIEKILTFRIPYYVGPLARGNSRFAWMTRKSEETITPWNFEEVVDKGASAQSFIERMTNFDKNLPNEKVLPKHSLLYEYFTVYNELTKVKYVTEGMRKPAFLSGEQKKAIVDLLFKTNRKVTVKQLKEDYFKKIECFDSVEISGVEDRFNASLGTYHDLLKIIKDKDFLDNEENEDILEDIVLTLTLFEDREMIEERLKTYAHLFDDKVMKQLKRRRYTGWGRLSRKLINGIRDKQSGKTILDFLKSDGFANRNFMQLIHDDSLTFKEDIQKAQVSGQGDSLHEHIANLAGSPAIKKGILQTVKVVDELVKVMGRHKPENIVIEMARENQTTQKGQKNSRERMKRIEEGIKELGSQILKEHPVENTQLQNEKLYLYYLQNGRDMYVDQELDINRLSDYDVDHIVPQSFLKDDSIDNKVLTRSDKARGKSDNVPSEEVVKKMKNYWRQLLNAKLITQRKFDNLTKAERGGLSELDKAGFIKRQLVETRQITKHVAQILDSRMNTKYDENDKLIREVKVITLKSKLVSDFRKDFQFYKVREINNYHHAHDAYLNAVVGTALIKKYPKLESEFVYGDYKVYDVRKMIAKSEQEIGKATAKYFFYSNIMNFFKTEITLANGEIRKRPLIETNGETGEIVWDKGRDFATVRKVLSMPQVNIVKKTEVQTGGFSKESILPKRNSDKLIARKKDWDPKKYGGFDSPTVAYSVLVVAKVEKGKSKKLKSVKELLGITIMERSSFEKNPIDFLEAKGYKEVKKDLIIKLPKYSLFELENGRKRMLASAGELQKGNELALPSKYVNFLYLASHYEKLKGSPEDNEQKQLFVEQHKHYLDEIIEQISEFSKRVILADANLDKVLSAYNKHRDKPIREQAENIIHLFTLTNLGAPAAFKYFDTTIDRKRYTSTKEVLDATLIHQSITGLYETRIDLSQLGGDGGGGGEAAAKGSSGGTLGIEDEYRLHETSTEPDVSLGSTWLSDFPQAWAETGGMGLAVRQAPLIIPLKATSTPVSIQQYPMSHEARLGIKPHIQRLLDQGILVPCQSPWNTPLLPVKKPGTNDYRPVQDLREVNKRVEDIHPTVPNPYNLLSGLPPSHQWYTVLDLKDAFFCLRLHPTSQPLFAFEWRDPGMGISGQLTWTRLPQGFKNSPTLFDEALHRDLADFRIQHPDLILLQYVDDILLAATSELDCQQGTRALLQTLGDLGYRASAKKAQICQKQVKYLGYLLREGQRWLTEARKETVMGQPVPKTPRQLREFLGTAGFCRLWIPGFAEMAAPLYPLTKTGTLFSWGPDQQKAYQEIKQALLTAPALGLPDLTKPFELFVDEKQGYAKGVLTQKLGPWRRPVAYLSKKLDPVAAGWPPCLRMVAAIAVLTKDAGKLTMGQPLVILAPHAVEALVKQPPDRWLSNARMTHYQAMLLDTDRVQFGPVVALNPATLLPLPEEGAPHDCLEILAETHGTRPDLTDQPIPDADHTWYTDGSSFLQEGQRKAGAAVTTETEVIWAGALPAGTSAQRAELIALTQALKMAEGKRLNVYTDSRYAFATAHIHGEIYRRRGLLTSEGREIKNKSEILALLKALFLPKRLSIIHCLGHQKGDSAEARGNRLADQAAREAAIKTPPDTSTLLAGKRTADGSEFEKRTADGSEFESPKKKAKVE

SEQ ID NO: 7290 - protein, 2096 aa, synthetic construct
MPAAKRVKLDGGDKKYSIGLDIGTNSVGWAVITDEYKVPSKKFKVLGNTDRHSIKKNLIGALLFDSGETAEATRLKRTARRRYTRRKNRICYLQEIFSNEMAKVDDSFFHRLEESFLVEEDKKHERHPIFGNIVDEVAYHEKYPTIYHLRKKLVDSTDKADLRLIYLALAHMIKFRGHFLIEGDLNPDNSDVDKLFIQLVQTYNQLFEENPINASGVDAKAILSARLSKSRRLENLIAQLPGEKKNGLFGNLIALSLGLTPNFKSNFDLAEDAKLQLSKDTYDDDLDNLLAQIGDQYADLFLAAKNLSDAILLSDILRVNTEITKAPLSASMIKRYDEHHQDLTLLKALVRQQLPEKYKEIFFDQSKNGYAGYIDGGASQEEFYKFIKPILEKMDGTEELLVKLNREDLLRKQRTFDNGSIPHQIHLGELHAILRRQEDFYPFLKDNREKIEKILTFRIPYYVGPLARGNSRFAWMTRKSEETITPWNFEEVVDKGASAQSFIERMTNFDKNLPNEKVLPKHSLLYEYFTVYNELTKVKYVTEGMRKPAFLSGEQKKAIVDLLFKTNRKVTVKQLKEDYFKKIECFDSVEISGVEDRFNASLGTYHDLLKIIKDKDFLDNEENEDILEDIVLTLTLFEDREMIEERLKTYAHLFDDKVMKQLKRRRYTGWGRLSRKLINGIRDKQSGKTILDFLKSDGFANRNFMQLIHDDSLTFKEDIQKAQVSGQGDSLHEHIANLAGSPAIKKGILQTVKVVDELVKVMGRHKPENIVIEMARENQTTQKGQKNSRERMKRIEEGIKELGSQILKEHPVENTQLQNEKLYLYYLQNGRDMYVDQELDINRLSDYDVDHIVPQSFLKDDSIDNKVLTRSDKARGKSDNVPSEEVVKKMKNYWRQLLNAKLITQRKFDNLTKAERGGLSELDKAGFIKRQLVETRQITKHVAQILDSRMNTKYDENDKLIREVKVITLKSKLVSDFRKDFQFYKVREINNYHHAHDAYLNAVVGTALIKKYPKLESEFVYGDYKVYDVRKMIAKSEQEIGKATAKYFFYSNIMNFFKTEITLANGEIRKRPLIETNGETGEIVWDKGRDFATVRKVLSMPQVNIVKKTEVQTGGFSKESILPKRNSDKLIARKKDWDPKKYGGFDSPTVAYSVLVVAKVEKGKSKKLKSVKELLGITIMERSSFEKNPIDFLEAKGYKEVKKDLIIKLPKYSLFELENGRKRMLASAGELQKGNELALPSKYVNFLYLASHYEKLKGSPEDNEQKQLFVEQHKHYLDEIIEQISEFSKRVILADANLDKVLSAYNKHRDKPIREQAENIIHLFTLTNLGAPAAFKYFDTTIDRKRYTSTKEVLDATLIHQSITGLYETRIDLSQLGGDGGGGGEAAAKGSSGGTLGIEDEYRLHETSTEPDVSLGSTWLSDFPQAWAETGGMGLAVRQAPLIIPLKATSTPVSIQQYPMSHEARLGIKPHIQRLLDQGILVPCQSPWNTPLLPVKKPGTNDYRPVQDLREVNKRVEDIHPTVPNPYNLLSGLPPSHQWYTVLDLKDAFFCLRLHPTSQPLFAFEWRDPGMGISGQLTWTRLPQGFKNSPTLFNEALHRDLADFRIQHPDLILLQYVDDILLAATSELDCQQGTRALLQTLGDLGYRASAKKAQICQKQVKYLGYLLREGQRWLTEARKETVMGQPVPKTPRQLREFLGTAGFCRLWIPGFAEMAAPLYPLTKPGTLFSWGPDQQKAYQEIKQALLTAPALGLPDLTKPFELFVDEKQGYAKGVLTQKLGPWRRPVAYLSKKLDPVAAGWPPCLRMVAAIAVLTKDAGKLTMGQPLVILAPHAVEALVKQPPDRWLSNARMTHYQAMLLDTDRVQFGPVVALNPATLLPLPEEGAPHDCLEILAETHGTRPDLTDQPIPDADHTWYTDGSSFLQEGQRKAGAAVTTETEVIWAGALPAGTSAQRAELIALTQALKMAEGKRLNVYTDSRYAFATAHIHGEIYRRRGWLTSEGREIKNKSEILALLKALFLPKRLSIIHCLGHQKGDSAEARGNRLADQAAREAAIKTPPDTSTLLAGKRTADGSEFEKRTADGSEFESPKKKAKVE

SEQ ID NO: 7291 - protein, 2096 aa, synthetic construct
MPAAKRVKLDGGDKKYSIGLDIGTNSVGWAVITDEYKVPSKKFKVLGNTDRHSIKKNLIGALLFDSGETAEATRLKRTARRRYTRRKNRICYLQEIFSNEMAKVDDSFFHRLEESFLVEEDKKHERHPIFGNIVDEVAYHEKYPTIYHLRKKLVDSTDKADLRLIYLALAHMIKFRGHFLIEGDLNPDNSDVDKLFIQLVQTYNQLFEENPINASGVDAKAILSARLSKSRRLENLIAQLPGEKKNGLFGNLIALSLGLTPNFKSNFDLAEDAKLQLSKDTYDDDLDNLLAQIGDQYADLFLAAKNLSDAILLSDILRVNTEITKAPLSASMIKRYDEHHQDLTLLKALVRQQLPEKYKEIFFDQSKNGYAGYIDGGASQEEFYKFIKPILEKMDGTEELLVKLNREDLLRKQRTFDNGSIPHQIHLGELHAILRRQEDFYPFLKDNREKIEKILTFRIPYYVGPLARGNSRFAWMTRKSEETITPWNFEEVVDKGASAQSFIERMTNFDKNLPNEKVLPKHSLLYEYFTVYNELTKVKYVTEGMRKPAFLSGEQKKAIVDLLFKTNRKVTVKQLKEDYFKKIECFDSVEISGVEDRFNASLGTYHDLLKIIKDKDFLDNEENEDILEDIVLTLTLFEDREMIEERLKTYAHLFDDKVMKQLKRRRYTGWGRLSRKLINGIRDKQSGKTILDFLKSDGFANRNFMQLIHDDSLTFKEDIQKAQVSGQGDSLHEHIANLAGSPAIKKGILQTVKVVDELVKVMGRHKPENIVIEMARENQTTQKGQKNSRERMKRIEEGIKELGSQILKEHPVENTQLQNEKLYLYYLQNGRDMYVDQELDINRLSDYDVDHIVPQSFLKDDSIDNKVLTRSDKARGKSDNVPSEEVVKKMKNYWRQLLNAKLITQRKFDNLTKAERGGLSELDKAGFIKRQLVETRQITKHVAQILDSRMNTKYDENDKLIREVKVITLKSKLVSDFRKDFQFYKVREINNYHHAHDAYLNAVVGTALIKKYPKLESEFVYGDYKVYDVRKMIAKSEQEIGKATAKYFFYSNIMNFFKTEITLANGEIRKRPLIETNGETGEIVWDKGRDFATVRKVLSMPQVNIVKKTEVQTGGFSKESILPKRNSDKLIARKKDWDPKKYGGFDSPTVAYSVLVVAKVEKGKSKKLKSVKELLGITIMERSSFEKNPIDFLEAKGYKEVKKDLIIKLPKYSLFELENGRKRMLASAGELQKGNELALPSKYVNFLYLASHYEKLKGSPEDNEQKQLFVEQHKHYLDEIIEQISEFSKRVILADANLDKVLSAYNKHRDKPIREQAENIIHLFTLTNLGAPAAFKYFDTTIDRKRYTSTKEVLDATLIHQSITGLYETRIDLSQLGGDGGGGGEAAAKGSSGGTLNIEDEYRLHETSKEPDVSLGSTWLSDFPQAWAETGGMGLAVRQAPLIIPLKATSTPVSIKQYPMSQEARLGIKPHIQRLLDQGILVPCQSPWNTPLLPVKKPGTNDYRPVQDLREVNKRVEDIHPTVPNPYNLLSGLPPSHQWYTVLDLKDAFFCLRLHPTSQPLFAFEWRDPEMGISGQLTWTRLPQGFKNSPTLFNEALHRDLAGFRIQHPDLILLQYVDDLLLAATSELDCQQGTRALLQTLGDLGYRASAKKAQICQKQVKYLGYLLKEGQRWLTEARKETVMGQPIPKTPRQLREFLGTAGFCRLWIPGFAEMAAPLYPLTKPGTLFNWGPDQQKAFQEIKQALLTAPALGLPDLTKPFELFVDEKQGYAKGVLTQKLGPWRRPVAYLSKKLDPVAAGWPPCLRMVAAIAVLTKDAGKLTMGQPLVILAPHAVEALVKQPPDRWLSNARMTHYQALLLDTDRVQFGPVVALNPATLLPLPEEGLQHDCLDILAEAHGTRSDLMDQPLPDADHTWYTDGSSFLQEGQRKAGAAVTTETEVIWARALPAGTSAQRAELIALTQALKMAEGKKLNVYTDSRYAFATAHIHGEIYRRRGWLTSEGKEIKNKDEILALLKALFLPKRLSIIHCPGHQKGNSAEARGNRMADQAAREVATRETPETSTLLAGKRTADGSEFEKRTADGSEFESPKKKAKVE

SEQ ID NO: 7292 - protein, 2096 aa, synthetic construct
MPAAKRVKLDGGDKKYSIGLDIGTNSVGWAVITDEYKVPSKKFKVLGNTDRHSIKKNLIGALLFDSGETAEATRLKRTARRRYTRRKNRICYLQEIFSNEMAKVDDSFFHRLEESFLVEEDKKHERHPIFGNIVDEVAYHEKYPTIYHLRKKLVDSTDKADLRLIYLALAHMIKFRGHFLIEGDLNPDNSDVDKLFIQLVQTYNQLFEENPINASGVDAKAILSARLSKSRRLENLIAQLPGEKKNGLFGNLIALSLGLTPNFKSNFDLAEDAKLQLSKDTYDDDLDNLLAQIGDQYADLFLAAKNLSDAILLSDILRVNTEITKAPLSASMIKRYDEHHQDLTLLKALVRQQLPEKYKEIFFDQSKNGYAGYIDGGASQEEFYKFIKPILEKMDGTEELLVKLNREDLLRKQRTFDNGSIPHQIHLGELHAILRRQEDFYPFLKDNREKIEKILTFRIPYYVGPLARGNSRFAWMTRKSEETITPWNFEEVVDKGASAQSFIERMTNFDKNLPNEKVLPKHSLLYEYFTVYNELTKVKYVTEGMRKPAFLSGEQKKAIVDLLFKTNRKVTVKQLKEDYFKKIECFDSVEISGVEDRFNASLGTYHDLLKIIKDKDFLDNEENEDILEDIVLTLTLFEDREMIEERLKTYAHLFDDKVMKQLKRRRYTGWGRLSRKLINGIRDKQSGKTILDFLKSDGFANRNFMQLIHDDSLTFKEDIQKAQVSGQGDSLHEHIANLAGSPAIKKGILQTVKVVDELVKVMGRHKPENIVIEMARENQTTQKGQKNSRERMKRIEEGIKELGSQILKEHPVENTQLQNEKLYLYYLQNGRDMYVDQELDINRLSDYDVDHIVPQSFLKDDSIDNKVLTRSDKARGKSDNVPSEEVVKKMKNYWRQLLNAKLITQRKFDNLTKAERGGLSELDKAGFIKRQLVETRQITKHVAQILDSRMNTKYDENDKLIREVKVITLKSKLVSDFRKDFQFYKVREINNYHHAHDAYLNAVVGTALIKKYPKLESEFVYGDYKVYDVRKMIAKSEQEIGKATAKYFFYSNIMNFFKTEITLANGEIRKRPLIETNGETGEIVWDKGRDFATVRKVLSMPQVNIVKKTEVQTGGFSKESILPKRNSDKLIARKKDWDPKKYGGFDSPTVAYSVLVVAKVEKGKSKKLKSVKELLGITIMERSSFEKNPIDFLEAKGYKEVKKDLIIKLPKYSLFELENGRKRMLASAGELQKGNELALPSKYVNFLYLASHYEKLKGSPEDNEQKQLFVEQHKHYLDEIIEQISEFSKRVILADANLDKVLSAYNKHRDKPIREQAENIIHLFTLTNLGAPAAFKYFDTTIDRKRYTSTKEVLDATLIHQSITGLYETRIDLSQLGGDGGGGGEAAAKGSSGGTLNIEDEYRLHETSKGPDVPLGSTWLSDFPQAWAETGGMGLAVRQAPLIIPLKATSTPVSIKQYPMSQEARLGIKPHIQRLLDQGILVPCQSPWNTPLLPVKKPGTNDYRPVQDLREVNKRVEDIHPTVPNPYNLLSGLPPSHQWYTVLDLKDAFFCLRLHPTSQSLFAFEWRDPEMGISGQLTWTRLPQGFKNSPTLFNEALHRDLADFRIQHPDLILLQYVDDLLLAATSELDCQQGTRALLQTLGDLGYRASAKKAQICQKQVKYLGYLLKEGQRWLTEARKETVMGQPTPKTPRQLREFLGTAGFCRLWIPGFAEMAAPLYPLTKPGTLFEWGPDQQKAYQEIKQALLTAPALGLPDLTKPFELFVDEKQGYAKGVLTQKLGPWRRPVAYLSKKLDPVAAGWPPCLRMVAAIAVLTKDAGKLTMGQPLVILAPHAVEALVKQPPDRWLSNARMTHYQALLLDTDRVQFGPIVALNPATLLPLPEEGLQHDCLDILAEAHGTRPDLTDQPLPDADHTWYTDGSSFLQEGQRKAGAAVTTETEVVWAKALPAGTSAQRAELIALTQALKMAEGKKLNVYTDSRYAFATAHIHGEIYRRRGWLTSEGKEIKNKDEILALLKALFLPKRLSIIHCPGHQKGNRAEARGNRMADQAAREVATRETPETSTLLAGKRTADGSEFEKRTADGSEFESPKKKAKVE

SEQ ID NO: 7293 - protein, 2096 aa, synthetic construct; identical to SEQ ID NO: 4530

SEQ ID NO: 7294 - protein, 2096 aa, synthetic construct
MPAAKRVKLDGGDKKYSIGLDIGTNSVGWAVITDEYKVPSKKFKVLGNTDRHSIKKNLIGALLFDSGETAEATRLKRTARRRYTRRKNRICYLQEIFSNEMAKVDDSFFHRLEESFLVEEDKKHERHPIFGNIVDEVAYHEKYPTIYHLRKKLVDSTDKADLRLIYLALAHMIKFRGHFLIEGDLNPDNSDVDKLFIQLVQTYNQLFEENPINASGVDAKAILSARLSKSRRLENLIAQLPGEKKNGLFGNLIALSLGLTPNFKSNFDLAEDAKLQLSKDTYDDDLDNLLAQIGDQYADLFLAAKNLSDAILLSDILRVNTEITKAPLSASMIKRYDEHHQDLTLLKALVRQQLPEKYKEIFFDQSKNGYAGYIDGGASQEEFYKFIKPILEKMDGTEELLVKLNREDLLRKQRTFDNGSIPHQIHLGELHAILRRQEDFYPFLKDNREKIEKILTFRIPYYVGPLARGNSRFAWMTRKSEETITPWNFEEVVDKGASAQSFIERMTNFDKNLPNEKVLPKHSLLYEYFTVYNELTKVKYVTEGMRKPAFLSGEQKKAIVDLLFKTNRKVTVKQLKEDYFKKIECFDSVEISGVEDRFNASLGTYHDLLKIIKDKDFLDNEENEDILEDIVLTLTLFEDREMIEERLKTYAHLFDDKVMKQLKRRRYTGWGRLSRKLINGIRDKQSGKTILDFLKSDGFANRNFMQLIHDDSLTFKEDIQKAQVSGQGDSLHEHIANLAGSPAIKKGILQTVKVVDELVKVMGRHKPENIVIEMARENQTTQKGQKNSRERMKRIEEGIKELGSQILKEHPVENTQLQNEKLYLYYLQNGRDMYVDQELDINRLSDYDVDHIVPQSFLKDDSIDNKVLTRSDKARGKSDNVPSEEVVKKMKNYWRQLLNAKLITQRKFDNLTKAERGGLSELDKAGFIKRQLVETRQITKHVAQILDSRMNTKYDENDKLIREVKVITLKSKLVSDFRKDFQFYKVREINNYHHAHDAYLNAVVGTALIKKYPKLESEFVYGDYKVYDVRKMIAKSEQEIGKATAKYFFYSNIMNFFKTEITLANGEIRKRPLIETNGETGEIVWDKGRDFATVRKVLSMPQVNIVKKTEVQTGGFSKESILPKRNSDKLIARKKDWDPKKYGGFDSPTVAYSVLVVAKVEKGKSKKLKSVKELLGITIMERSSFEKNPIDFLEAKGYKEVKKDLIIKLPKYSLFELENGRKRMLASAGELQKGNELALPSKYVNFLYLASHYEKLKGSPEDNEQKQLFVEQHKHYLDEIIEQISEFSKRVILADANLDKVLSAYNKHRDKPIREQAENIIHLFTLTNLGAPAAFKYFDTTIDRKRYTSTKEVLDATLIHQSITGLYETRIDLSQLGGDGGGGGEAAAKGSSGGTLNIEDEHRLHETSKEPDVSLGSTWLSDFPQAWAETGGMGLAVRQAPLIIPLKATSTPVSIKQYPMSQEARLGIKPHIQRLLDQGILVPCQSPWNTPLLPVKKPGTNDYRPVQDLREVNKRVEDIHPTVPNPYNLLSGLPPSHQWYTVLDLKDAFFCLRLHPTSQPLFAFEWRDPEMGISGQLTWTRLPQGFKNSPTLFDEALHRDLADFRIQHPDLILLQYVDDLLLAATSELDCQQGTRALLQTLGNLGYRASAKKAQICQKQVKYLGYLLKEGQRWLTEARKETVMGQPTPKTPRQLREFLGTAGFCRLWIPGFAEMAAPLYPLTKTGTLFNWGPDQQKAYQEIKQALLTAPALGLPDLTKPFELFVDEKQGYAKGVLTQKLGPWRRPVAYLSKKLDPVAAGWPPCLRMVAAIAVLTKDAGKLTMGQPLVILAPHAVEALVKQPPDRWLSNARMTHYQALLLDTDRVQFGPVVALNPATLLPLPEEGLQHNCLDILAEAHGTRPDLTDQPLPDADHTWYTDGSSLLQEGQRKAGAAVTTETEVIWAKALPAGTSAQRAELIALTQALKMAEGKKLNVYTDSRYAFATAHIHGEIYRRRGLLTSEGKEIKNKDEILALLKALFLPKRLSIIHCPGHQKGHSAEARGNRMADQAARKAAITETPDTSTLLAGKRTADGSEFEKRTADGSEFESPKKKAKVE

SEQ ID NO: 7295 - protein, 2096 aa, synthetic construct; identical to SEQ ID NO: 4530

SEQ ID NO: 7296 - protein, 2090 aa, synthetic construct
MPAAKRVKLDGGDKKYSIGLDIGTNSVGWAVITDEYKVPSKKFKVLGNTDRHSIKKNLIGALLFDSGETAEATRLKRTARRRYTRRKNRICYLQEIFSNEMAKVDDSFFHRLEESFLVEEDKKHERHPIFGNIVDEVAYHEKYPTIYHLRKKLVDSTDKADLRLIYLALAHMIKFRGHFLIEGDLNPDNSDVDKLFIQLVQTYNQLFEENPINASGVDAKAILSARLSKSRRLENLIAQLPGEKKNGLFGNLIALSLGLTPNFKSNFDLAEDAKLQLSKDTYDDDLDNLLAQIGDQYADLFLAAKNLSDAILLSDILRVNTEITKAPLSASMIKRYDEHHQDLTLLKALVRQQLPEKYKEIFFDQSKNGYAGYIDGGASQEEFYKFIKPILEKMDGTEELLVKLNREDLLRKQRTFDNGSIPHQIHLGELHAILRRQEDFYPFLKDNREKIEKILTFRIPYYVGPLARGNSRFAWMTRKSEETITPWNFEEVVDKGASAQSFIERMTNFDKNLPNEKVLPKHSLLYEYFTVYNELTKVKYVTEGMRKPAFLSGEQKKAIVDLLFKTNRKVTVKQLKEDYFKKIECFDSVEISGVEDRFNASLGTYHDLLKIIKDKDFLDNEENEDILEDIVLTLTLFEDREMIEERLKTYAHLFDDKVMKQLKRRRYTGWGRLSRKLINGIRDKQSGKTILDFLKSDGFANRNFMQLIHDDSLTFKEDIQKAQVSGQGDSLHEHIANLAGSPAIKKGILQTVKVVDELVKVMGRHKPENIVIEMARENQTTQKGQKNSRERMKRIEEGIKELGSQILKEHPVENTQLQNEKLYLYYLQNGRDMYVDQELDINRLSDYDVDHIVPQSFLKDDSIDNKVLTRSDKARGKSDNVPSEEVVKKMKNYWRQLLNAKLITQRKFDNLTKAERGGLSELDKAGFIKRQLVETRQITKHVAQILDSRMNTKYDENDKLIREVKVITLKSKLVSDFRKDFQFYKVREINNYHHAHDAYLNAVVGTALIKKYPKLESEFVYGDYKVYDVRKMIAKSEQEIGKATAKYFFYSNIMNFFKTEITLANGEIRKRPLIETNGETGEIVWDKGRDFATVRKVLSMPQVNIVKKTEVQTGGFSKESILPKRNSDKLIARKKDWDPKKYGGFDSPTVAYSVLVVAKVEKGKSKKLKSVKELLGITIMERSSFEKNPIDFLEAKGYKEVKKDLIIKLPKYSLFELENGRKRMLASAGELQKGNELALPSKYVNFLYLASHYEKLKGSPEDNEQKQLFVEQHKHYLDEIIEQISEFSKRVILADANLDKVLSAYNKHRDKPIREQAENIIHLFTLTNLGAPAAFKYFDTTIDRKRYTSTKEVLDATLIHQSITGLYETRIDLSQLGGDGGGGGEAAAKGSSGGTLQLDDEYRLYSPLVKPDQNIQFWLEQFPQAWAETAGMGLAKQVPPQVIQLKASATPVSVRQYPLSKEAQEGIRPHVQRLIQQGILVPVQSPWNTPLLPVRKPGTNDYRPVQDLREVNKRVQDIHPTVPNPYNLLCALPPQRSWYTVLDLKDAFFCLRLHPTSQPLFAFEWRDPGTGRTGQLTWTRLPQGFKNSPTIFDEALHRDLANFRIQHPQVTLLQYVDDLLLAGATKQDCLEGTKALLLELSDLGYRASAKKAQICRREVTYLGYSLRDGQRWLTEARKKTVVQIPAPTTAKQVREFLGTAGFCRLWIPGFATLAAPLYPLTKEKGEFSWAPEHQKAFDAIKKALLSAPALALPDVTKPFTLYVDERKGVARGVLTQTLGPWRRPVAYLSKKLDPVASGWPVCLKAIAAVAILVKDADKLTLGQNITVIAPHALENIVRQPPDRWMTNARMTHYQSLLLTERVTFAPPAALNPATLLPEETDEPVTHDCHQLLIEETGVRKDLTDIPLTGEVLTWFTDGSSYVVEGKRMAGAAVVDGTRTIWASSLPEGTSAQKAELMALTQALRLAEGKSINIYTDSRYAFATAHVHGAIYKQRGLLTSAGREIKNKEEILSLLEALHLPKRLAIIHCPGHQKAKDPISRGNQMADRVAKQAAQGVNLLAGKRTADGSEFEKRTADGSEFESPKKKAKVE

SEQ ID NO: 7297 - protein, 2176 aa, synthetic construct
MPAAKRVKLDGGDKKYSIGLDIGTNSVGWAVITDEYKVPSKKFKVLGNTDRHSIKKNLIGALLFDSGETAEATRLKRTARRRYTRRKNRICYLQEIFSNEMAKVDDSFFHRLEESFLVEEDKKHERHPIFGNIVDEVAYHEKYPTIYHLRKKLVDSTDKADLRLIYLALAHMIKFRGHFLIEGDLNPDNSDVDKLFIQLVQTYNQLFEENPINASGVDAKAILSARLSKSRRLENLIAQLPGEKKNGLFGNLIALSLGLTPNFKSNFDLAEDAKLQLSKDTYDDDLDNLLAQIGDQYADLFLAAKNLSDAILLSDILRVNTEITKAPLSASMIKRYDEHHQDLTLLKALVRQQLPEKYKEIFFDQSKNGYAGYIDGGASQEEFYKFIKPILEKMDGTEELLVKLNREDLLRKQRTFDNGSIPHQIHLGELHAILRRQEDFYPFLKDNREKIEKILTFRIPYYVGPLARGNSRFAWMTRKSEETITPWNFEEVVDKGASAQSFIERMTNFDKNLPNEKVLPKHSLLYEYFTVYNELTKVKYVTEGMRKPAFLSGEQKKAIVDLLFKTNRKVTVKQLKEDYFKKIECFDSVEISGVEDRFNASLGTYHDLLKIIKDKDFLDNEENEDILEDIVLTLTLFEDREMIEERLKTYAHLFDDKVMKQLKRRRYTGWGRLSRKLINGIRDKQSGKTILDFLKSDGFANRNFMQLIHDDSLTFKEDIQKAQVSGQGDSLHEHIANLAGSPAIKKGILQTVKVVDELVKVMGRHKPENIVIEMARENQTTQKGQKNSRERMKRIEEGIKELGSQILKEHPVENTQLQNEKLYLYYLQNGRDMYVDQELDINRLSDYDVDHIVPQSFLKDDSIDNKVLTRSDKARGKSDNVPSEEVVKKMKNYWRQLLNAKLITQRKFDNLTKAERGGLSELDKAGFIKRQLVETRQITKHVAQILDSRMNTKYDENDKLIREVKVITLKSKLVSDFRKDFQFYKVREINNYHHAHDAYLNAVVGTALIKKYPKLESEFVYGDYKVYDVRKMIAKSEQEIGKATAKYFFYSNIMNFFKTEITLANGEIRKRPLIETNGETGEIVWDKGRDFATVRKVLSMPQVNIVKKTEVQTGGFSKESILPKRNSDKLIARKKDWDPKKYGGFDSPTVAYSVLVVAKVEKGKSKKLKSVKELLGITIMERSSFEKNPIDFLEAKGYKEVKKDLIIKLPKYSLFELENGRKRMLASAGELQKGNELALPSKYVNFLYLASHYEKLKGSPEDNEQKQLFVEQHKHYLDEIIEQISEFSKRVILADANLDKVLSAYNKHRDKPIREQAENIIHLFTLTNLGAPAAFKYFDTTIDRKRYTSTKEVLDATLIHQSITGLYETRIDLSQLGGDGGGGGEAAAKGSSGGMNPLQLLQPLPAEVKGTKLLAHWNSGATITCIPESFLEDEQPIKQTLIKTIHGEKQQNVYYLTFKVKGRKVEAEVIASPYEYILLSPTDVPWLTQQPLQLTILVPLQEYQDRILNKTALPEEQKQQLKALFTKYDNLWQHWENQVGHRKIRPHNIATGDYPPRPQKQYPINPKAKPSIQIVIDDLLKQGVLTPQNSTMNTPVYPVPKPDGRWRMVLDYREVNKTIPLTAAQNQHSAGILATIVRQKYKTTLDLANGFWAHPITPDSYWLTAFTWQGKQYCWTRLPQGFLNSPALFTADAVDLLKEVPNVQVYVDDIYLSHDNPHEHIQQLEKVFQILLQAGYVVSLKKSEIGQRTVEFLGFNITKEGRGLTDTFKTKLLNVTPPKDLKQLQSILGLLNFARNFIPNFAELVQTLYNLIASSKGKYIEWTEDNTKQLNKVIEALNTASNLEERLPDQRLVIKVNTSPSAGYVRYYNESGKKPIMYLNYVFSKAELKFSMLEKLLTTMHKALIKAMDLAMGQEILVYSPIVSMTKIQKTPLPERKALPIRWITWMTYLEDPRIQFHYDKTLPELKHIPDVYTSSIPPLKHPSQYEGVFCTDGSAIKSPDPTKSNNAGMGIVHAIYNPEYKILNQWSIPLGHHTAQMAEIAAVEFACKKALKVPGPVLVITDSFYVAESANKELPYWKSNGFVNNKKEPLKHISKWKSIAECLSIKPDITIQHEKGHQPINTSIHTEGNALADKLATQGSYVVNAGKRTADGSEFEKRTADGSEFESPKKKAKVE

SEQ ID NO: 7298 - protein, 2096 aa, synthetic construct
MPAAKRVKLDGGDKKYSIGLDIGTNSVGWAVITDEYKVPSKKFKVLGNTDRHSIKKNLIGALLFDSGETAEATRLKRTARRRYTRRKNRICYLQEIFSNEMAKVDDSFFHRLEESFLVEEDKKHERHPIFGNIVDEVAYHEKYPTIYHLRKKLVDSTDKADLRLIYLALAHMIKFRGHFLIEGDLNPDNSDVDKLFIQLVQTYNQLFEENPINASGVDAKAILSARLSKSRRLENLIAQLPGEKKNGLFGNLIALSLGLTPNFKSNFDLAEDAKLQLSKDTYDDDLDNLLAQIGDQYADLFLAAKNLSDAILLSDILRVNTEITKAPLSASMIKRYDEHHQDLTLLKALVRQQLPEKYKEIFFDQSKNGYAGYIDGGASQEEFYKFIKPILEKMDGTEELLVKLNREDLLRKQRTFDNGSIPHQIHLGELHAILRRQEDFYPFLKDNREKIEKILTFRIPYYVGPLARGNSRFAWMTRKSEETITPWNFEEVVDKGASAQSFIERMTNFDKNLPNEKVLPKHSLLYEYFTVYNELTKVKYVTEGMRKPAFLSGEQKKAIVDLLFKTNRKVTVKQLKEDYFKKIECFDSVEISGVEDRFNASLGTYHDLLKIIKDKDFLDNEENEDILEDIVLTLTLFEDREMIEERLKTYAHLFDDKVMKQLKRRRYTGWGRLSRKLINGIRDKQSGKTILDFLKSDGFANRNFMQLIHDDSLTFKEDIQKAQVSGQGDSLHEHIANLAGSPAIKKGILQTVKVVDELVKVMGRHKPENIVIEMARENQTTQKGQKNSRERMKRIEEGIKELGSQILKEHPVENTQLQNEKLYLYYLQNGRDMYVDQELDINRLSDYDVDHIVPQSFLKDDSIDNKVLTRSDKARGKSDNVPSEEVVKKMKNYWRQLLNAKLITQRKFDNLTKAERGGLSELDKAGFIKRQLVETRQITKHVAQILDSRMNTKYDENDKLIREVKVITLKSKLVSDFRKDFQFYKVREINNYHHAHDAYLNAVVGTALIKKYPKLESEFVYGDYKVYDVRKMIAKSEQEIGKATAKYFFYSNIMNFFKTEITLANGEIRKRPLIETNGETGEIVWDKGRDFATVRKVLSMPQVNIVKKTEVQTGGFSKESILPKRNSDKLIARKKDWDPKKYGGFDSPTVAYSVLVVAKVEKGKSKKLKSVKELLGITIMERSSFEKNPIDFLEAKGYKEVKKDLIIKLPKYSLFELENGRKRMLASAGELQKGNELALPSKYVNFLYLASHYEKLKGSPEDNEQKQLFVEQHKHYLDEIIEQISEFSKRVILADANLDKVLSAYNKHRDKPIREQAENIIHLFTLTNLGAPAAFKYFDTTIDRKRYTSTKEVLDATLIHQSITGLYETRIDLSQLGGDGGGGGEAAAKGSSGGTLNIEDEYRLHETSKEPDVPLGSTWLSDFPQAWAETGGMGLAVRQAPLIIPLKATSTPVSIKQYPMSQEARLGIKPHIQRLLDQGILVPCQSPWNTPLLPVKKPGTNDYRPVQDLREVNKRVEDIHPTVPNPYNLLSGLPPSHQWYTVLDLKDAFFCLRLHPTSQPLFAFEWRDPEMGISGQLTWTRLPQGFKNSPTLFNEALHRDLADFRIQHPDLILLQYVDDLLLAATSEQDCQRGTRALLQTLGNLGYRASAKKAQICQKQVKYLGYLLKEGQRWLTEARKETVMGQPTPKTPRQLREFLGTAGFCRLWIPGFAEMAAPLYPLTKPGTLFNWGPDQQKAYQEIKQALLTAPALGLPDLTKPFELFVDEKQGYAKGVLTQKLGPWRRPVAYLSKKLDPVAAGWPPCLRMVAAIAVLTKDAGKLTMGQPLVILAPHAVEALVKQPPDRWLSNARMTHYQAMLLDTDRVQFGPVVALNPATLLPLPEKEAPHDCLEILAETHGTRPDLTDQPIPDADYTWYTDGSSFLQEGQRRAGAAVTTETEVIWARALPAGTSAQRAELIALTQALKMAEGKKLNVYTDSRYAFATAHVHGEIYRRRGWLTSEGREIKNKNEILALLKALFLPKRLSIIHCPGHQKGNSAEARGNRMADQAAREAAMKAVLETSTLLAGKRTADGSEFEKRTADGSEFESPKKKAKVE

SEQ ID NO: 7299 - protein, 2102 aa, synthetic construct
MPAAKRVKLDGGDKKYSIGLDIGTNSVGWAVITDEYKVPSKKFKVLGNTDRHSIKKNLIGALLFDSGETAEATRLKRTARRRYTRRKNRICYLQEIFSNEMAKVDDSFFHRLEESFLVEEDKKHERHPIFGNIVDEVAYHEKYPTIYHLRKKLVDSTDKADLRLIYLALAHMIKFRGHFLIEGDLNPDNSDVDKLFIQLVQTYNQLFEENPINASGVDAKAILSARLSKSRRLENLIAQLPGEKKNGLFGNLIALSLGLTPNFKSNFDLAEDAKLQLSKDTYDDDLDNLLAQIGDQYADLFLAAKNLSDAILLSDILRVNTEITKAPLSASMIKRYDEHHQDLTLLKALVRQQLPEKYKEIFFDQSKNGYAGYIDGGASQEEFYKFIKPILEKMDGTEELLVKLNREDLLRKQRTFDNGSIPHQIHLGELHAILRRQEDFYPFLKDNREKIEKILTFRIPYYVGPLARGNSRFAWMTRKSEETITPWNFEEVVDKGASAQSFIERMTNFDKNLPNEKVLPKHSLLYEYFTVYNELTKVKYVTEGMRKPAFLSGEQKKAIVDLLFKTNRKVTVKQLKEDYFKKIECFDSVEISGVEDRFNASLGTYHDLLKIIKDKDFLDNEENEDILEDIVLTLTLFEDREMIEERLKTYAHLFDDKVMKQLKRRRYTGWGRLSRKLINGIRDKQSGKTILDFLKSDGFANRNFMQLIHDDSLTFKEDIQKAQVSGQGDSLHEHIANLAGSPAIKKGILQTVKVVDELVKVMGRHKPENIVIEMARENQTTQKGQKNSRERMKRIEEGIKELGSQILKEHPVENTQLQNEKLYLYYLQNGRDMYVDQELDINRLSDYDVDHIVPQSFLKDDSIDNKVLTRSDKARGKSDNVPSEEVVKKMKNYWRQLLNAKLITQRKFDNLTKAERGGLSELDKAGFIKRQLVETRQITKHVAQILDSRMNTKYDENDKLIREVKVITLKSKLVSDFRKDFQFYKVREINNYHHAHDAYLNAVVGTALIKKYPKLESEFVYGDYKVYDVRKMIAKSEQEIGKATAKYFFYSNIMNFFKTEITLANGEIRKRPLIETNGETGEIVWDKGRDFATVRKVLSMPQVNIVKKTEVQTGGFSKESILPKRNSDKLIARKKDWDPKKYGGFDSPTVAYSVLVVAKVEKGKSKKLKSVKELLGITIMERSSFEKNPIDFLEAKGYKEVKKDLIIKLPKYSLFELENGRKRMLASAGELQKGNELALPSKYVNFLYLASHYEKLKGSPEDNEQKQLFVEQHKHYLDEIIEQISEFSKRVILADANLDKVLSAYNKHRDKPIREQAENIIHLFTLTNLGAPAAFKYFDTTIDRKRYTSTKEVLDATLIHQSITGLYETRIDLSQLGGDGGGSSGGGEAAAKGGTVSLQDEHRLFDIPVTTSLPDVWLQDFPQAWAETGGLGRAKCQAPIIIDLKPTAVPVSIKQYPMSLEAHMGIRQHIIKFLELGVLRPCRSPWNTPLLPVKKPGTQDYRPVQDLREINKRTVDIHPTVPNPYNLLSTLKPDYSWYTVLDLKDAFFCLPLAPQSQELFAFEWKDPERGISGQLTWTRLPQGFKNSPTLFNEALHRDLTDFRTQHPEVTLLQYVDDLLLAAPTKKACTQGTRHLLQELGEKGYRASAKKAQICQTKVTYLGYILSEGKRWLTPGRIETVARIPPPRNPREVREFLGTAGFCRLWIPGFAELAAPLYALTKPSTPFTWQTEHQLAFEALKKALLSAPALGLPDTSKPFTLFLDERQGIAKGVLTQKLGPWKRPVAYLSKKLDPVAAGWPPCLRIMAATAMLVKDSAKLTLGQPLTVITPHTLEAIVRQPPDRWITNARLTHYQALLLDTDRVQFGPPVTLNPATLLPVPENQPSPHDCRQVLAETHGTREDLKDQELPDADHTWYTDGSSYLDSGTRRAGAAVVDGHNTIWAQSLPPGTSAQKAELIALTKALELSKGKKANIYTDSRYAFATAHTHGSIYERRGWLTSEGKEIKNKAEIIALLKALFLPQEVAIIHCPGHQKGQDPVAVGNRQADRVARQAAMAEVLTLATEPDNTSHITAGKRTADGSEFEKRTADGSEFESPKKKAKVE

SEQ ID NO: 7300 - protein, 2218 aa, synthetic construct
MPAAKRVKLDGGDKKYSIGLDIGTNSVGWAVITDEYKVPSKKFKVLGNTDRHSIKKNLIGALLFDSGETAEATRLKRTARRRYTRRKNRICYLQEIFSNEMAKVDDSFFHRLEESFLVEEDKKHERHPIFGNIVDEVAYHEKYPTIYHLRKKLVDSTDKADLRLIYLALAHMIKFRGHFLIEGDLNPDNSDVDKLFIQLVQTYNQLFEENPINASGVDAKAILSARLSKSRRLENLIAQLPGEKKNGLFGNLIALSLGLTPNFKSNFDLAEDAKLQLSKDTYDDDLDNLLAQIGDQYADLFLAAKNLSDAILLSDILRVNTEITKAPLSASMIKRYDEHHQDLTLLKALVRQQLPEKYKEIFFDQSKNGYAGYIDGGASQEEFYKFIKPILEKMDGTEELLVKLNREDLLRKQRTFDNGSIPHQIHLGELHAILRRQEDFYPFLKDNREKIEKILTFRIPYYVGPLARGNSRFAWMTRKSEETITPWNFEEVVDKGASAQSFIERMTNFDKNLPNEKVLPKHSLLYEYFTVYNELTKVKYVTEGMRKPAFLSGEQKKAIVDLLFKTNRKVTVKQLKEDYFKKIECFDSVEISGVEDRFNASLGTYHDLLKIIKDKDFLDNEENEDILEDIVLTLTLFEDREMIEERLKTYAHLFDDKVMKQLKRRRYTGWGRLSRKLINGIRDKQSGKTILDFLKSDGFANRNFMQLIHDDSLTFKEDIQKAQVSGQGDSLHEHIANLAGSPAIKKGILQTVKVVDELVKVMGRHKPENIVIEMARENQTTQKGQKNSRERMKRIEEGIKELGSQILKEHPVENTQLQNEKLYLYYLQNGRDMYVDQELDINRLSDYDVDHIVPQSFLKDDSIDNKVLTRSDKARGKSDNVPSEEVVKKMKNYWRQLLNAKLITQRKFDNLTKAERGGLSELDKAGFIKRQLVETRQITKHVAQILDSRMNTKYDENDKLIREVKVITLKSKLVSDFRKDFQFYKVREINNYHHAHDAYLNAVVGTALIKKYPKLESEFVYGDYKVYDVRKMIAKSEQEIGKATAKYFFYSNIMNFFKTEITLANGEIRKRPLIETNGETGEIVWDKGRDFATVRKVLSMPQVNIVKKTEVQTGGFSKESILPKRNSDKLIARKKDWDPKKYGGFDSPTVAYSVLVVAKVEKGKSKKLKSVKELLGITIMERSSFEKNPIDFLEAKGYKEVKKDLIIKLPKYSLFELENGRKRMLASAGELQKGNELALPSKYVNFLYLASHYEKLKGSPEDNEQKQLFVEQHKHYLDEIIEQISEFSKRVILADANLDKVLSAYNKHRDKPIREQAENIIHLFTLTNLGAPAAFKYFDTTIDRKRYTSTKEVLDATLIHQSITGLYETRIDLSQLGGDGGGSSGGGEAAAKGGTLGDQGSRGSDPLPEPRVTLTVEGIPTEFLVNTGAEHSVLTKPMGKMGSKRTVVAGATGSKVYPWTTKRLLKIGQKQVTHSFLVIPECPAPLLGRDLLTKLKAQIQFSTEGPQVTWEDRPAMCLVLNLEEEYRLHEKPVPPSIDPSWLQLFPMVWAEKAGMGLANQVPPVVVELKSDASPVAVRQYPMSKEAREGIRPHIQRFLDLGILVPCQSPWNTPLLPVKKPGTNDYRPVQDLREVNKRVQDIHPTVPNPYNLLSSLPPSHTWYSVLDLKDAFFCLKLHPNSQPLFAFEWRDPEKGNTGQLTWTRLPQGFKNSPTLFDEALHRDLASFRALNPQVVMLQYVDDLLVAAPTYRDCKEGTRRLLQELSKLGYRVSAKKAQLCREEVTYLGYLLKGGKRWLTPARKATVMKIPTPTTPRQVREFLGTAGFCRLWIPGFASLAAPLYPLTREKVPFTWTEAHQEAFGRIKEALLSAPALALPDLTKPFALYVDEKEGVARGVLTQTLGPWRRPVAYLSKKLDPVASGWPTCLKAIAAVALLLKDADKLTLGQNVLVIAPHNLESIVRQPPDRWMTNARMTHYQSLLLNERVSFAPPAILNPATLLPVESDDTPIHICSEILAEETGTRPDLRDQPLPGVPAWYTDGSSFIMDGRRQAGAAIVDNKRTVWASNLPEGTSAQKAELIALTQALRLAEGKSINIYTDSRYAFATAHVHGAIYKQRGLLTSAGKDIKNKEEILALLEAIHLPKRVAIIHCPGHQRGTDPVATGNRKADEAAKQAAQSTRILTETTKNAGKRTADGSEFEKRTADGSEFESPKKKAKVE

SEQ ID NO: 7301 - protein, 2127 aa, synthetic construct
MPAAKRVKLDGGDKKYSIGLDIGTNSVGWAVITDEYKVPSKKFKVLGNTDRHSIKKNLIGALLFDSGETAEATRLKRTARRRYTRRKNRICYLQEIFSNEMAKVDDSFFHRLEESFLVEEDKKHERHPIFGNIVDEVAYHEKYPTIYHLRKKLVDSTDKADLRLIYLALAHMIKFRGHFLIEGDLNPDNSDVDKLFIQLVQTYNQLFEENPINASGVDAKAILSARLSKSRRLENLIAQLPGEKKNGLFGNLIALSLGLTPNFKSNFDLAEDAKLQLSKDTYDDDLDNLLAQIGDQYADLFLAAKNLSDAILLSDILRVNTEITKAPLSASMIKRYDEHHQDLTLLKALVRQQLPEKYKEIFFDQSKNGYAGYIDGGASQEEFYKFIKPILEKMDGTEELLVKLNREDLLRKQRTFDNGSIPHQIHLGELHAILRRQEDFYPFLKDNREKIEKILTFRIPYYVGPLARGNSRFAWMTRKSEETITPWNFEEVVDKGASAQSFIERMTNFDKNLPNEKVLPKHSLLYEYFTVYNELTKVKYVTEGMRKPAFLSGEQKKAIVDLLFKTNRKVTVKQLKEDYFKKIECFDSVEISGVEDRFNASLGTYHDLLKIIKDKDFLDNEENEDILEDIVLTLTLFEDREMIEERLKTYAHLFDDKVMKQLKRRRYTGWGRLSRKLINGIRDKQSGKTILDFLKSDGFANRNFMQLIHDDSLTFKEDIQKAQVSGQGDSLHEHIANLAGSPAIKKGILQTVKVVDELVKVMGRHKPENIVIEMARENQTTQKGQKNSRERMKRIEEGIKELGSQILKEHPVENTQLQNEKLYLYYLQNGRDMYVDQELDINRLSDYDVDHIVPQSFLKDDSIDNKVLTRSDKARGKSDNVPSEEVVKKMKNYWRQLLNAKLITQRKFDNLTKAERGGLSELDKAGFIKRQLVETRQITKHVAQILDSRMNTKYDENDKLIREVKVITLKSKLVSDFRKDFQFYKVREINNYHHAHDAYLNAVVGTALIKKYPKLESEFVYGDYKVYDVRKMIAKSEQEIGKATAKYFFYSNIMNFFKTEITLANGEIRKRPLIETNGETGEIVWDKGRDFATVRKVLSMPQVNIVKKTEVQTGGFSKESILPKRNSDKLIARKKDWDPKKYGGFDSPTVAYSVLVVAKVEKGKSKKLKSVKELLGITIMERSSFEKNPIDFLEAKGYKEVKKDLIIKLPKYSLFELENGRKRMLASAGELQKGNELALPSKYVNFLYLASHYEKLKGSPEDNEQKQLFVEQHKHYLDEIIEQISEFSKRVILADANLDKVLSAYNKHRDKPIREQAENIIHLFTLTNLGAPAAFKYFDTTIDRKRYTSTKEVLDATLIHQSITGLYETRIDLSQLGGDGGGSSGGGEAAAKGGLLGRDLLTKLKAQIQFSTEGPQVTWEDRPAMCLVLNLEEEYRLHEKPVPPSIDPSWLQLFPMVWAEKAGMGLANQVPPVVVELKSDASPVAVRQYPMSKEAREGIRPHIQRFLDLGILVPCQSPWNTPLLPVKKPGTNDYRPVQDLREVNKRVQDIHPTVPNPYNLLSSLPPSHTWYSVLDLKDAFFCLKLHPNSQPLFAFEWRDPEKGNTGQLTWTRLPQGFKNSPTLFNEALHRDLASFRALNPQVVMLQYVDDLLVAAPTYRDCKEGTRRLLQELSKLGYRVSAKKAQLCREEVTYLGYLLKGGKRWLTPARKATVMKIPTPTTPRQVREFLGTAGFCRLWIPGFASLAAPLYPLTRPKVPFTWTEAHQEAFGRIKEALLSAPALALPDLTKPFALYVDEKEGVARGVLTQTLGPWRRPVAYLSKKLDPVASGWPTCLKAIAAVALLLKDADKLTLGQNVLVIAPHNLESIVRQPPDRWMTNARMTHYQSLLLNERVSFAPPAILNPATLLPVESDDTPIHICSEILAEETGTRPDLRDQPLPGVPAWYTDGSSFIMDGRRQAGAAIVDNKRTVWASNLPEGTSAQKAELIALTQALRLAEGKSINIYTDSRYAFATAHVHGAIYKQRGWLTSAGKDIKNKEEILALLEAIHLPKRVAIIHCPGHQRGTDPVATGNRKADEAAKQAAQSTRILTETTKNAGKRTADGSEFEKRTADGSEFESPKKKAKVE

SEQ ID NO: 7302 - protein, 2096 aa, synthetic construct
MPAAKRVKLDGGDKKYSIGLDIGTNSVGWAVITDEYKVPSKKFKVLGNTDRHSIKKNLIGALLFDSGETAEATRLKRTARRRYTRRKNRICYLQEIFSNEMAKVDDSFFHRLEESFLVEEDKKHERHPIFGNIVDEVAYHEKYPTIYHLRKKLVDSTDKADLRLIYLALAHMIKFRGHFLIEGDLNPDNSDVDKLFIQLVQTYNQLFEENPINASGVDAKAILSARLSKSRRLENLIAQLPGEKKNGLFGNLIALSLGLTPNFKSNFDLAEDAKLQLSKDTYDDDLDNLLAQIGDQYADLFLAAKNLSDAILLSDILRVNTEITKAPLSASMIKRYDEHHQDLTLLKALVRQQLPEKYKEIFFDQSKNGYAGYIDGGASQEEFYKFIKPILEKMDGTEELLVKLNREDLLRKQRTFDNGSIPHQIHLGELHAILRRQEDFYPFLKDNREKIEKILTFRIPYYVGPLARGNSRFAWMTRKSEETITPWNFEEVVDKGASAQSFIERMTNFDKNLPNEKVLPKHSLLYEYFTVYNELTKVKYVTEGMRKPAFLSGEQKKAIVDLLFKTNRKVTVKQLKEDYFKKIECFDSVEISGVEDRFNASLGTYHDLLKIIKDKDFLDNEENEDILEDIVLTLTLFEDREMIEERLKTYAHLFDDKVMKQLKRRRYTGWGRLSRKLINGIRDKQSGKTILDFLKSDGFANRNFMQLIHDDSLTFKEDIQKAQVSGQGDSLHEHIANLAGSPAIKKGILQTVKVVDELVKVMGRHKPENIVIEMARENQTTQKGQKNSRERMKRIEEGIKELGSQILKEHPVENTQLQNEKLYLYYLQNGRDMYVDQELDINRLSDYDVDHIVPQSFLKDDSIDNKVLTRSDKARGKSDNVPSEEVVKKMKNYWRQLLNAKLITQRKFDNLTKAERGGLSELDKAGFIKRQLVETRQITKHVAQILDSRMNTKYDENDKLIREVKVITLKSKLVSDFRKDFQFYKVREINNYHHAHDAYLNAVVGTALIKKYPKLESEFVYGDYKVYDVRKMIAKSEQEIGKATAKYFFYSNIMNFFKTEITLANGEIRKRPLIETNGETGEIVWDKGRDFATVRKVLSMPQVNIVKKTEVQTGGFSKESILPKRNSDKLIARKKDWDPKKYGGFDSPTVAYSVLVVAKVEKGKSKKLKSVKELLGITIMERSSFEKNPIDFLEAKGYKEVKKDLIIKLPKYSLFELENGRKRMLASAGELQKGNELALPSKYVNFLYLASHYEKLKGSPEDNEQKQLFVEQHKHYLDEIIEQISEFSKRVILADANLDKVLSAYNKHRDKPIREQAENIIHLFTLTNLGAPAAFKYFDTTIDRKRYTSTKEVLDATLIHQSITGLYETRIDLSQLGGDGGGSSGGGEAAAKGGTLNIEDEYRLHETSKGPDVPLGSTWLSDFPQAWAETGGMGLAVRQAPLIIPLKATSTPVSIKQYPMSQEARLGIKPHIQRLLDQGILVPCQSPWNTPLLPVKKPGTNDYRPVQDLREVNKRVEDIHPTVPNPYNLLSGLPPSHQWYTVLDLKDAFFCLRLHPTSQSLFAFEWRDPEMGISGQLTWTRLPQGFKNSPTLFNEALHRDLADFRIQHPDLILLQYVDDLLLAATSELDCQQGTRALLQTLGDLGYRASAKKAQICQKQVKYLGYLLKEGQRWLTEARKETVMGQPTPKTPRQLREFLGTAGFCRLWIPGFAEMAAPLYPLTKPGTLFEWGPDQQKAYQEIKQALLTAPALGLPDLTKPFELFVDEKQGYAKGVLTQKLGPWRRPVAYLSKKLDPVAAGWPPCLRMVAAIAVLTKDAGKLTMGQPLVILAPHAVEALVKQPPDRWLSNARMTHYQALLLDTDRVQFGPIVALNPATLLPLPEEGLQHDCLDILAEAHGTRPDLTDQPLPDADHTWYTDGSSFLQEGQRKAGAAVTTETEVVWAKALPAGTSAQRAELIALTQALKMAEGKKLNVYTDSRYAFATAHIHGEIYRRRGWLTSEGKEIKNKDEILALLKALFLPKRLSIIHCPGHQKGNRAEARGNRMADQAAREVATRETPETSTLLAGKRTADGSEFEKRTADGSEFESPKKKAKVE

SEQ ID NO: 7303 - protein, 2090 aa, synthetic construct
MPAAKRVKLDGGDKKYSIGLDIGTNSVGWAVITDEYKVPSKKFKVLGNTDRHSIKKNLIGALLFDSGETAEATRLKRTARRRYTRRKNRICYLQEIFSNEMAKVDDSFFHRLEESFLVEEDKKHERHPIFGNIVDEVAYHEKYPTIYHLRKKLVDSTDKADLRLIYLALAHMIKFRGHFLIEGDLNPDNSDVDKLFIQLVQTYNQLFEENPINASGVDAKAILSARLSKSRRLENLIAQLPGEKKNGLFGNLIALSLGLTPNFKSNFDLAEDAKLQLSKDTYDDDLDNLLAQIGDQYADLFLAAKNLSDAILLSDILRVNTEITKAPLSASMIKRYDEHHQDLTLLKALVRQQLPEKYKEIFFDQSKNGYAGYIDGGASQEEFYKFIKPILEKMDGTEELLVKLNREDLLRKQRTFDNGSIPHQIHLGELHAILRRQEDFYPFLKDNREKIEKILTFRIPYYVGPLARGNSRFAWMTRKSEETITPWNFEEVVDKGASAQSFIERMTNFDKNLPNEKVLPKHSLLYEYFTVYNELTKVKYVTEGMRKPAFLSGEQKKAIVDLLFKTNRKVTVKQLKEDYFKKIECFDSVEISGVEDRFNASLGTYHDLLKIIKDKDFLDNEENEDILEDIVLTLTLFEDREMIEERLKTYAHLFDDKVMKQLKRRRYTGWGRLSRKLINGIRDKQSGKTILDFLKSDGFANRNFMQLIHDDSLTFKEDIQKAQVSGQGDSLHEHIANLAGSPAIKKGILQTVKVVDELVKVMGRHKPENIVIEMARENQTTQKGQKNSRERMKRIEEGIKELGSQILKEHPVENTQLQNEKLYLYYLQNGRDMYVDQELDINRLSDYDVDHIVPQSFLKDDSIDNKVLTRSDKARGKSDNVPSEEVVKKMKNYWRQLLNAKLITQRKFDNLTKAERGGLSELDKAGFIKRQLVETRQITKHVAQILDSRMNTKYDENDKLIREVKVITLKSKLVSDFRKDFQFYKVREINNYHHAHDAYLNAVVGTALIKKYPKLESEFVYGDYKVYDVRKMIAKSEQEIGKATAKYFFYSNIMNFFKTEITLANGEIRKRPLIETNGETGEIVWDKGRDFATVRKVLSMPQVNIVKKTEVQTGGFSKESILPKRNSDKLIARKKDWDPKKYGGFDSPTVAYSVLVVAKVEKGKSKKLKSVKELLGITIMERSSFEKNPIDFLEAKGYKEVKKDLIIKLPKYSLFELENGRKRMLASAGELQKGNELALPSKYVNFLYLASHYEKLKGSPEDNEQKQLFVEQHKHYLDEIIEQISEFSKRVILADANLDKVLSAYNKHRDKPIREQAENIIHLFTLTNLGAPAAFKYFDTTIDRKRYTSTKEVLDATLIHQSITGLYETRIDLSQLGGDGGGSSGGGEAAAKGGTLQLDDEYRLYSPLVKPDQNIQFWLEQFPQAWAETAGMGLAKQVPPQVIQLKASATPVSVRQYPLSKEAQEGIRPHVQRLIQQGILVPVQSPWNTPLLPVRKPGTNDYRPVQDLREVNKRVQDIHPTVPNPYNLLCALPPQRSWYTVLDLKDAFFCLRLHPTSQPLFAFEWRDPGTGRTGQLTWTRLPQGFKNSPTIFDEALHRDLANFRIQHPQVTLLQYVDDLLLAGATKQDCLEGTKALLLELSDLGYRASAKKAQICRREVTYLGYSLRDGQRWLTEARKKTVVQIPAPTTAKQVREFLGTAGFCRLWIPGFATLAAPLYPLTKEKGEFSWAPEHQKAFDAIKKALLSAPALALPDVTKPFTLYVDERKGVARGVLTQTLGPWRRPVAYLSKKLDPVASGWPVCLKAIAAVAILVKDADKLTLGQNITVIAPHALENIVRQPPDRWMTNARMTHYQSLLLTERVTFAPPAALNPATLLPEETDEPVTHDCHQLLIEETGVRKDLTDIPLTGEVLTWFTDGSSYVVEGKRMAGAAVVDGTRTIWASSLPEGTSAQKAELMALTQALRLAEGKSINIYTDSRYAFATAHVHGAIYKQRGLLTSAGREIKNKEEILSLLEALHLPKRLAIIHCPGHQKAKDPISRGNQMADRVAKQAAQGVNLLAGKRTADGSEFEKRTADGSEFESPKKKAKVE

SEQ ID NO: 7304 - protein, 2087 aa, synthetic construct
MPAAKRVKLDGGDKKYSIGLDIGTNSVGWAVITDEYKVPSKKFKVLGNTDRHSIKKNLIGALLFDSGETAEATRLKRTARRRYTRRKNRICYLQEIFSNEMAKVDDSFFHRLEESFLVEEDKKHERHPIFGNIVDEVAYHEKYPTIYHLRKKLVDSTDKADLRLIYLALAHMIKFRGHFLIEGDLNPDNSDVDKLFIQLVQTYNQLFEENPINASGVDAKAILSARLSKSRRLENLIAQLPGEKKNGLFGNLIALSLGLTPNFKSNFDLAEDAKLQLSKDTYDDDLDNLLAQIGDQYADLFLAAKNLSDAILLSDILRVNTEITKAPLSASMIKRYDEHHQDLTLLKALVRQQLPEKYKEIFFDQSKNGYAGYIDGGASQEEFYKFIKPILEKMDGTEELLVKLNREDLLRKQRTFDNGSIPHQIHLGELHAILRRQEDFYPFLKDNREKIEKILTFRIPYYVGPLARGNSRFAWMTRKSEETITPWNFEEVVDKGASAQSFIERMTNFDKNLPNEKVLPKHSLLYEYFTVYNELTKVKYVTEGMRKPAFLSGEQKKAIVDLLFKTNRKVTVKQLKEDYFKKIECFDSVEISGVEDRFNASLGTYHDLLKIIKDKDFLDNEENEDILEDIVLTLTLFEDREMIEERLKTYAHLFDDKVMKQLKRRRYTGWGRLSRKLINGIRDKQSGKTILDFLKSDGFANRNFMQLIHDDSLTFKEDIQKAQVSGQGDSLHEHIANLAGSPAIKKGILQTVKVVDELVKVMGRHKPENIVIEMARENQTTQKGQKNSRERMKRIEEGIKELGSQILKEHPVENTQLQNEKLYLYYLQNGRDMYVDQELDINRLSDYDVDHIVPQSFLKDDSIDNKVLTRSDKARGKSDNVPSEEVVKKMKNYWRQLLNAKLITQRKFDNLTKAERGGLSELDKAGFIKRQLVETRQITKHVAQILDSRMNTKYDENDKLIREVKVITLKSKLVSDFRKDFQFYKVREINNYHHAHDAYLNAVVGTALIKKYPKLESEFVYGDYKVYDVRKMIAKSEQEIGKATAKYFFYSNIMNFFKTEITLANGEIRKRPLIETNGETGEIVWDKGRDFATVRKVLSMPQVNIVKKTEVQTGGFSKESILPKRNSDKLIARKKDWDPKKYGGFDSPTVAYSVLVVAKVEKGKSKKLKSVKELLGITIMERSSFEKNPIDFLEAKGYKEVKKDLIIKLPKYSLFELENGRKRMLASAGELQKGNELALPSKYVNFLYLASHYEKLKGSPEDNEQKQLFVEQHKHYLDEIIEQISEFSKRVILADANLDKVLSAYNKHRDKPIREQAENIIHLFTLTNLGAPAAFKYFDTTIDRKRYTSTKEVLDATLIHQSITGLYETRIDLSQLGGDGGGSSGGGEAAAKGGIPWLMKKPLQLTTLVPLQEYEERLLKQTMLTGSYKEKLQSLFLKYDALWQHWENQVGHRRIKPHHIATGTVNPRPQKQYPINPKAKASIQTVINDLLKQGVLIQQNSIMNTPVYPVPKPDGKWRMVLDYREVNKTIPLIAAQNQHSAGILSSIFRGKYKTTLDLSNGFWAHSITPESYWLTAFTWLGQQYCWTRLPQGFLNSPALFNADVVDLLKEVPNVQVYVDDIYISHDDPREHLEQLEKVFSLLLNAGYVVSLKKSEIAQHEVEFLGFNITKEGRGLTETFKQKLLNITPPRDLKQLQSILGKLNFARNFIPNFSELVKPLYNIIATAPGKYITWTTDNSQQLQNIISMLNSAENLEERNPEVRLIMKVNTSPSAGYIRFYNEFAKRPIMYLNYVYTKAEVKFTNTEKLLTTIHKGLIKALDLGMGQEILVYSPIVSMTKIQKTPLPERKALPIRWITWMSYLEDPRIQFHYDKTLPELQQVPTVTDDIIAKIKHPSEFSMVFYTDGSAIKHPNVNKSHNAGMGIAQVQFKPEFTVINTWSIPLGDHTAQLAEVAAVEFACKKALKIDGPVLIVTDSFYVAESVNKELPYWQSNGFFNNKKKPLKHVSKWKSIADCIQLKPDIIIIHEKGHQPTASTFHTEGNNLADKLATQGSYVVNAGKRTADGSEFEKRTADGSEFESPKKKAKVE

SEQ ID NO: 7305 - protein, 2176 aa, synthetic construct
MPAAKRVKLDGGDKKYSIGLDIGTNSVGWAVITDEYKVPSKKFKVLGNTDRHSIKKNLIGALLFDSGETAEATRLKRTARRRYTRRKNRICYLQEIFSNEMAKVDDSFFHRLEESFLVEEDKKHERHPIFGNIVDEVAYHEKYPTIYHLRKKLVDSTDKADLRLIYLALAHMIKFRGHFLIEGDLNPDNSDVDKLFIQLVQTYNQLFEENPINASGVDAKAILSARLSKSRRLENLIAQLPGEKKNGLFGNLIALSLGLTPNFKSNFDLAEDAKLQLSKDTYDDDLDNLLAQIGDQYADLFLAAKNLSDAILLSDILRVNTEITKAPLSASMIKRYDEHHQDLTLLKALVRQQLPEKYKEIFFDQSKNGYAGYIDGGASQEEFYKFIKPILEKMDGTEELLVKLNREDLLRKQRTFDNGSIPHQIHLGELHAILRRQEDFYPFLKDNREKIEKILTFRIPYYVGPLARGNSRFAWMTRKSEETITPWNFEEVVDKGASAQSFIERMTNFDKNLPNEKVLPKHSLLYEYFTVYNELTKVKYVTEGMRKPAFLSGEQKKAIVDLLFKTNRKVTVKQLKEDYFKKIECFDSVEISGVEDRFNASLGTYHDLLKIIKDKDFLDNEENEDILEDIVLTLTLFEDREMIEERLKTYAHLFDDKVMKQLKRRRYTGWGRLSRKLINGIRDKQSGKTILDFLKSDGFANRNFMQLIHDDSLTFKEDIQKAQVSGQGDSLHEHIANLAGSPAIKKGILQTVKVVDELVKVMGRHKPENIVIEMARENQTTQKGQKNSRERMKRIEEGIKELGSQILKEHPVENTQLQNEKLYLYYLQNGRDMYVDQELDINRLSDYDVDHIVPQSFLKDDSIDNKVLTRSDKARGKSDNVPSEEVVKKMKNYWRQLLNAKLITQRKFDNLTKAERGGLSELDKAGFIKRQLVETRQITKHVAQILDSRMNTKYDENDKLIREVKVITLKSKLVSDFRKDFQFYKVREINNYHHAHDAYLNAVVGTALIKKYPKLESEFVYGDYKVYDVRKMIAKSEQEIGKATAKYFFYSNIMNFFKTEITLANGEIRKRPLIETNGETGEIVWDKGRDFATVRKVLSMPQVNIVKKTEVQTGGFSKESILPKRNSDKLIARKKDWDPKKYGGFDSPTVAYSVLVVAKVEKGKSKKLKSVKELLGITIMERSSFEKNPIDFLEAKGYKEVKKDLIIKLPKYSLFELENGRKRMLASAGELQKGNELALPSKYVNFLYLASHYEKLKGSPEDNEQKQLFVEQHKHYLDEIIEQISEFSKRVILADANLDKVLSAYNKHRDKPIREQAENIIHLFTLTNLGAPAAFKYFDTTIDRKRYTSTKEVLDATLIHQSITGLYETRIDLSQLGGDGGGSSGGGEAAAKGGMDPLQLLQPLEAEIKGTKLKAHWNSGATITCVPQAFLEEEVPIKNIWIKTIHGEKEQPVYYLTFKIQGRKVEAEVISSPYDYILVSPSDIPWLMKKPLQLTTLVPLQEYEERLLKQTMLTGSYKEKLQSLFLKYDALWQHWENQVGHRRIKPHHIATGTVNPRPQKQYPINPKAKASIQTVINDLLKQGVLIQQNSIMNTPVYPVPKPDGKWRMVLDYREVNKTIPLIAAQNQHSAGILSSIFRGKYKTTLDLSNGFWAHSITPESYWLTAFTWLGQQYCWTRLPQGFLNSPALFNADVVDLLKEVPNVQVYVDDIYISHDDPREHLEQLEKVFSLLLNAGYVVSLKKSEIAQHEVEFLGFNITKEGRGLTETFKQKLLNITPPRDLKQLQSILGLLNFARNFIPNFSELVKPLYNIIATAPGKYITWTTDNSQQLQNIISMLNSAENLEERNPEVRLIMKVNTSPSAGYIRFYNEFAKRPIMYLNYVYTKAEVKFTNTEKLLTTIHKGLIKALDLGMGQEILVYSPIVSMTKIQKTPLPERKALPIRWITWMSYLEDPRIQFHYDKTLPELQQVPTVTDDIIAKIKHPSEFSMVFYTDGSAIKHPNVNKSHNAGMGIAQVQFKPEFTVINTWSIPLGDHTAQLAEVAAVEFACKKALKIDGPVLIVTDSFYVAESVNKELPYWQSNGFFNNKKKPLKHVSKWKSIADCIQLKPDIIIIHEKGHQPTASTFHTEGNNLADKLATQGSYVVNAGKRTADGSEFEKRTADGSEFESPKKKAKVE

SEQ ID NO: 7306 - protein, 2094 aa, synthetic construct
MPAAKRVKLDGGDKKYSIGLDIGTNSVGWAVITDEYKVPSKKFKVLGNTDRHSIKKNLIGALLFDSGETAEATRLKRTARRRYTRRKNRICYLQEIFSNEMAKVDDSFFHRLEESFLVEEDKKHERHPIFGNIVDEVAYHEKYPTIYHLRKKLVDSTDKADLRLIYLALAHMIKFRGHFLIEGDLNPDNSDVDKLFIQLVQTYNQLFEENPINASGVDAKAILSARLSKSRRLENLIAQLPGEKKNGLFGNLIALSLGLTPNFKSNFDLAEDAKLQLSKDTYDDDLDNLLAQIGDQYADLFLAAKNLSDAILLSDILRVNTEITKAPLSASMIKRYDEHHQDLTLLKALVRQQLPEKYKEIFFDQSKNGYAGYIDGGASQEEFYKFIKPILEKMDGTEELLVKLNREDLLRKQRTFDNGSIPHQIHLGELHAILRRQEDFYPFLKDNREKIEKILTFRIPYYVGPLARGNSRFAWMTRKSEETITPWNFEEVVDKGASAQSFIERMTNFDKNLPNEKVLPKHSLLYEYFTVYNELTKVKYVTEGMRKPAFLSGEQKKAIVDLLFKTNRKVTVKQLKEDYFKKIECFDSVEISGVEDRFNASLGTYHDLLKIIKDKDFLDNEENEDILEDIVLTLTLFEDREMIEERLKTYAHLFDDKVMKQLKRRRYTGWGRLSRKLINGIRDKQSGKTILDFLKSDGFANRNFMQLIHDDSLTFKEDIQKAQVSGQGDSLHEHIANLAGSPAIKKGILQTVKVVDELVKVMGRHKPENIVIEMARENQTTQKGQKNSRERMKRIEEGIKELGSQILKEHPVENTQLQNEKLYLYYLQNGRDMYVDQELDINRLSDYDVDHIVPQSFLKDDSIDNKVLTRSDKARGKSDNVPSEEVVKKMKNYWRQLLNAKLITQRKFDNLTKAERGGLSELDKAGFIKRQLVETRQITKHVAQILDSRMNTKYDENDKLIREVKVITLKSKLVSDFRKDFQFYKVREINNYHHAHDAYLNAVVGTALIKKYPKLESEFVYGDYKVYDVRKMIAKSEQEIGKATAKYFFYSNIMNFFKTEITLANGEIRKRPLIETNGETGEIVWDKGRDFATVRKVLSMPQVNIVKKTEVQTGGFSKESILPKRNSDKLIARKKDWDPKKYGGFDSPTVAYSVLVVAKVEKGKSKKLKSVKELLGITIMERSSFEKNPIDFLEAKGYKEVKKDLIIKLPKYSLFELENGRKRMLASAGELQKGNELALPSKYVNFLYLASHYEKLKGSPEDNEQKQLFVEQHKHYLDEIIEQISEFSKRVILADANLDKVLSAYNKHRDKPIREQAENIIHLFTLTNLGAPAAFKYFDTTIDRKRYTSTKEVLDATLIHQSITGLYETRIDLSQLGGDGGGSSGGGEAAAKGGVLNLEEEYRLHEKPVPSSIDPSWLQLFPTVWAERAGMGLANQVPPVVVELRSGASPVAVRQYPMSKEAREGIRPHIQRFLDLGVLVPCQSPWNTPLLPVKKPGTNDYRPVQDLREINKRVQDIHPTVPNPYNLLSSLPPSHTWYSVLDLKDAFFCLKLHPNSQPLFAFEWRDPEKGNTGQLTWTRLPQGFKNSPTLFNEALHRDLAPFRALNPQVVLLQYVDDLLVAAPTYRDCKEGTQKLLQELSKLGYRVSAKKAQLCQKEVTYLGYLLKEGKRWLTPARKATVMKIPPPTTPRQVREFLGTAGFCRLWIPGFASLAAPLYPLTKPSIPFIWTEEHQKAFDRIKEALLSAPALALPDLTKPFTLYVDERAGVARGVLTQTLGPWRRPVAYLSKKLDPVASGWPTCLKAVAAVALLLKDADKLTLGQNVTVIASHSLESIVRQPPDRWMTNARMTHYQSLLLNERVSFAPPAVLNPATLLPVESEATPVHRCSEILAEETGTRRDLKDQPLPGVPAWYTDGSSFIAEGKRRAGAAIVDGKRTVWASSLPEGTSAQKAELVALTQALRLAEGKDINIYTDSRYAFATAHIHGAIYKQRGWLTSAGKDIKNKEEILALLEAIHLPKRVAIIHCPGHQKGNDPVATGNRRADEAAKQAALSTRVLAETTKPAGKRTADGSEFEKRTADGSEFESPKKKAKVE

SEQ ID NO: 7307 - protein, 2102 aa, synthetic construct
MPAAKRVKLDGGDKKYSIGLDIGTNSVGWAVITDEYKVPSKKFKVLGNTDRHSIKKNLIGALLFDSGETAEATRLKRTARRRYTRRKNRICYLQEIFSNEMAKVDDSFFHRLEESFLVEEDKKHERHPIFGNIVDEVAYHEKYPTIYHLRKKLVDSTDKADLRLIYLALAHMIKFRGHFLIEGDLNPDNSDVDKLFIQLVQTYNQLFEENPINASGVDAKAILSARLSKSRRLENLIAQLPGEKKNGLFGNLIALSLGLTPNFKSNFDLAEDAKLQLSKDTYDDDLDNLLAQIGDQYADLFLAAKNLSDAILLSDILRVNTEITKAPLSASMIKRYDEHHQDLTLLKALVRQQLPEKYKEIFFDQSKNGYAGYIDGGASQEEFYKFIKPILEKMDGTEELLVKLNREDLLRKQRTFDNGSIPHQIHLGELHAILRRQEDFYPFLKDNREKIEKILTFRIPYYVGPLARGNSRFAWMTRKSEETITPWNFEEVVDKGASAQSFIERMTNFDKNLPNEKVLPKHSLLYEYFTVYNELTKVKYVTEGMRKPAFLSGEQKKAIVDLLFKTNRKVTVKQLKEDYFKKIECFDSVEISGVEDRFNASLGTYHDLLKIIKDKDFLDNEENEDILEDIVLTLTLFEDREMIEERLKTYAHLFDDKVMKQLKRRRYTGWGRLSRKLINGIRDKQSGKTILDFLKSDGFANRNFMQLIHDDSLTFKEDIQKAQVSGQGDSLHEHIANLAGSPAIKKGILQTVKVVDELVKVMGRHKPENIVIEMARENQTTQKGQKNSRERMKRIEEGIKELGSQILKEHPVENTQLQNEKLYLYYLQNGRDMYVDQELDINRLSDYDVDHIVPQSFLKDDSIDNKVLTRSDKARGKSDNVPSEEVVKKMKNYWRQLLNAKLITQRKFDNLTKAERGGLSELDKAGFIKRQLVETRQITKHVAQILDSRMNTKYDENDKLIREVKVITLKSKLVSDFRKDFQFYKVREINNYHHAHDAYLNAVVGTALIKKYPKLESEFVYGDYKVYDVRKMIAKSEQEIGKATAKYFFYSNIMNFFKTEITLANGEIRKRPLIETNGETGEIVWDKGRDFATVRKVLSMPQVNIVKKTEVQTGGFSKESILPKRNSDKLIARKKDWDPKKYGGFDSPTVAYSVLVVAKVEKGKSKKLKSVKELLGITIMERSSFEKNPIDFLEAKGYKEVKKDLIIKLPKYSLFELENGRKRMLASAGELQKGNELALPSKYVNFLYLASHYEKLKGSPEDNEQKQLFVEQHKHYLDEIIEQISEFSKRVILADANLDKVLSAYNKHRDKPIREQAENIIHLFTLTNLGAPAAFKYFDTTIDRKRYTSTKEVLDATLIHQSITGLYETRIDLSQLGGDGGGSSEAAAKGGGGGTVSLQDEHRLFDIPVTTSLPDVWLQDFPQAWAETGGLGRAKCQAPIIIDLKPTAVPVSIKQYPMSLEAHMGIRQHIIKFLELGVLRPCRSPWNTPLLPVKKPGTQDYRPVQDLREINKRTVDIHPTVPNPYNLLSTLKPDYSWYTVLDLKDAFFCLPLAPQSQELFAFEWKDPERGISGQLTWTRLPQGFKNSPTLFNEALHRDLTDFRTQHPEVTLLQYVDDLLLAAPTKKACTQGTRHLLQELGEKGYRASAKKAQICQTKVTYLGYILSEGKRWLTPGRIETVARIPPPRNPREVREFLGTAGFCRLWIPGFAELAAPLYALTKPSTPFTWQTEHQLAFEALKKALLSAPALGLPDTSKPFTLFLDERQGIAKGVLTQKLGPWKRPVAYLSKKLDPVAAGWPPCLRIMAATAMLVKDSAKLTLGQPLTVITPHTLEAIVRQPPDRWITNARLTHYQALLLDTDRVQFGPPVTLNPATLLPVPENQPSPHDCRQVLAETHGTREDLKDQELPDADHTWYTDGSSYLDSGTRRAGAAVVDGHNTIWAQSLPPGTSAQKAELIALTKALELSKGKKANIYTDSRYAFATAHTHGSIYERRGWLTSEGKEIKNKAEIIALLKALFLPQEVAIIHCPGHQKGQDPVAVGNRQADRVARQAAMAEVLTLATEPDNTSHITAGKRTADGSEFEKRTADGSEFESPKKKAKVE

SEQ ID NO: 7308 - protein, 2173 aa, synthetic construct
MPAAKRVKLDGGDKKYSIGLDIGTNSVGWAVITDEYKVPSKKFKVLGNTDRHSIKKNLIGALLFDSGETAEATRLKRTARRRYTRRKNRICYLQEIFSNEMAKVDDSFFHRLEESFLVEEDKKHERHPIFGNIVDEVAYHEKYPTIYHLRKKLVDSTDKADLRLIYLALAHMIKFRGHFLIEGDLNPDNSDVDKLFIQLVQTYNQLFEENPINASGVDAKAILSARLSKSRRLENLIAQLPGEKKNGLFGNLIALSLGLTPNFKSNFDLAEDAKLQLSKDTYDDDLDNLLAQIGDQYADLFLAAKNLSDAILLSDILRVNTEITKAPLSASMIKRYDEHHQDLTLLKALVRQQLPEKYKEIFFDQSKNGYAGYIDGGASQEEFYKFIKPILEKMDGTEELLVKLNREDLLRKQRTFDNGSIPHQIHLGELHAILRRQEDFYPFLKDNREKIEKILTFRIPYYVGPLARGNSRFAWMTRKSEETITPWNFEEVVDKGASAQSFIERMTNFDKNLPNEKVLPKHSLLYEYFTVYNELTKVKYVTEGMRKPAFLSGEQKKAIVDLLFKTNRKVTVKQLKEDYFKKIECFDSVEISGVEDRFNASLGTYHDLLKIIKDKDFLDNEENEDILEDIVLTLTLFEDREMIEERLKTYAHLFDDKVMKQLKRRRYTGWGRLSRKLINGIRDKQSGKTILDFLKSDGFANRNFMQLIHDDSLTFKEDIQKAQVSGQGDSLHEHIANLAGSPAIKKGILQTVKVVDELVKVMGRHKPENIVIEMARENQTTQKGQKNSRERMKRIEEGIKELGSQILKEHPVENTQLQNEKLYLYYLQNGRDMYVDQELDINRLSDYDVDHIVPQSFLKDDSIDNKVLTRSDKARGKSDNVPSEEVVKKMKNYWRQLLNAKLITQRKFDNLTKAERGGLSELDKAGFIKRQLVETRQITKHVAQILDSRMNTKYDENDKLIREVKVITLKSKLVSDFRKDFQFYKVREINNYHHAHDAYLNAVVGTALIKKYPKLESEFVYGDYKVYDVRKMIAKSEQEIGKATAKYFFYSNIMNFFKTEITLANGEIRKRPLIETNGETGEIVWDKGRDFATVRKVLSMPQVNIVKKTEVQTGGFSKESILPKRNSDKLIARKKDWDPKKYGGFDSPTVAYSVLVVAKVEKGKSKKLKSVKELLGITIMERSSFEKNPIDFLEAKGYKEVKKDLIIKLPKYSLFELENGRKRMLASAGELQKGNELALPSKYVNFLYLASHYEKLKGSPEDNEQKQLFVEQHKHYLDEIIEQISEFSKRVILADANLDKVLSAYNKHRDKPIREQAENIIHLFTLTNLGAPAAFKYFDTTIDRKRYTSTKEVLDATLIHQSITGLYETRIDLSQLGGDGGGSSEAAAKGGGGGMDLLKPLTVERKGVKIKGYWNSQADITCVPKDLLQGEEPVRQQNVTTIHGTQEGDVYYVNLKIDGRRINTEVIGTTLDYAIITPGDVPWILKKPLELTIKLDLEEQQGTLLNNSILSKKGKEELKQLFEKYSALWQSWENQVGHRRIRPHKIATGTVKPTPQKQYHINPKAKPDIQIVINDLLKQGVLIQKESTMNTPVYPVPKPNGRWRMVLDYRAVNKVTPLIAVQNQHSYGILGSLFKGRYKTTIDLSNGFWAHPIVPEDYWITAFTWQGKQYCWTVLPQGFLNSPGLFNGDVVDLLQGIPNVEVYVDDVYISHDSEKEHLEYLDILFNRLKEAGYIISLKKSNIANSIVDFLGFQITNEGRGLTDTFKEKLENITAPTTLKQLQSILGKLNFARNFIPDFTELIAPLYALIPKSPKNYVPWQIEHSTTLETLITKLNGAEYLQGRKGDKTLIMKVNASYTTGYIRYYNEGEKKPISYVSIVFSKTELKFTELEKLLTTVHKGLLKALDLSMGQNIHVYSPIVSMQNIQKTPQTAKKALASRWLSWLSYLEDPRIRFFYDPQMPALKDLPAVDTGKDNKKHPSNFQHIFYTDGSAITSPTKEGHLNAGMGIVYFINKDGNLQKQQEWSISLGNHTAQFAEIAAFEFALKKCLPLGGNILVVTDSNYVAKAYNEELDVWASNGFVNNRKKPLKHISKWKSVADLKRLRPDVVVTHEPGHQKLDSSPHAYGNNLADQLATQASFKVHAGKRTADGSEFEKRTADGSEFESPKKKAKVE

SEQ ID NO: 7309 - protein, 2095 aa, synthetic construct
MPAAKRVKLDGGDKKYSIGLDIGTNSVGWAVITDEYKVPSKKFKVLGNTDRHSIKKNLIGALLFDSGETAEATRLKRTARRRYTRRKNRICYLQEIFSNEMAKVDDSFFHRLEESFLVEEDKKHERHPIFGNIVDEVAYHEKYPTIYHLRKKLVDSTDKADLRLIYLALAHMIKFRGHFLIEGDLNPDNSDVDKLFIQLVQTYNQLFEENPINASGVDAKAILSARLSKSRRLENLIAQLPGEKKNGLFGNLIALSLGLTPNFKSNFDLAEDAKLQLSKDTYDDDLDNLLAQIGDQYADLFLAAKNLSDAILLSDILRVNTEITKAPLSASMIKRYDEHHQDLTLLKALVRQQLPEKYKEIFFDQSKNGYAGYIDGGASQEEFYKFIKPILEKMDGTEELLVKLNREDLLRKQRTFDNGSIPHQIHLGELHAILRRQEDFYPFLKDNREKIEKILTFRIPYYVGPLARGNSRFAWMTRKSEETITPWNFEEVVDKGASAQSFIERMTNFDKNLPNEKVLPKHSLLYEYFTVYNELTKVKYVTEGMRKPAFLSGEQKKAIVDLLFKTNRKVTVKQLKEDYFKKIECFDSVEISGVEDRFNASLGTYHDLLKIIKDKDFLDNEENEDILEDIVLTLTLFEDREMIEERLKTYAHLFDDKVMKQLKRRRYTGWGRLSRKLINGIRDKQSGKTILDFLKSDGFANRNFMQLIHDDSLTFKEDIQKAQVSGQGDSLHEHIANLAGSPAIKKGILQTVKVVDELVKVMGRHKPENIVIEMARENQTTQKGQKNSRERMKRIEEGIKELGSQILKEHPVENTQLQNEKLYLYYLQNGRDMYVDQELDINRLSDYDVDHIVPQSFLKDDSIDNKVLTRSDKARGKSDNVPSEEVVKKMKNYWRQLLNAKLITQRKFDNLTKAERGGLSELDKAGFIKRQLVETRQITKHVAQILDSRMNTKYDENDKLIREVKVITLKSKLVSDFRKDFQFYKVREINNYHHAHDAYLNAVVGTALIKKYPKLESEFVYGDYKVYDVRKMIAKSEQEIGKATAKYFFYSNIMNFFKTEITLANGEIRKRPLIETNGETGEIVWDKGRDFATVRKVLSMPQVNIVKKTEVQTGGFSKESILPKRNSDKLIARKKDWDPKKYGGFDSPTVAYSVLVVAKVEKGKSKKLKSVKELLGITIMERSSFEKNPIDFLEAKGYKEVKKDLIIKLPKYSLFELENGRKRMLASAGELQKGNELALPSKYVNFLYLASHYEKLKGSPEDNEQKQLFVEQHKHYLDEIIEQISEFSKRVILADANLDKVLSAYNKHRDKPIREQAENIIHLFTLTNLGAPAAFKYFDTTIDRKRYTSTKEVLDATLIHQSITGLYETRIDLSQLGGDGGGSSEAAAKGGGGGTLQLEEEYRLFEPESTQKQEMDIWLKNFPQAWAETGGMGTAHCQAPVLIQLKATATPISIRQYPMPHEAYQGIKPHIRRMLDQGILKPCQSPWNTPLLPVKKPGTEDYRPVQDLREVNKRVEDIHPTVPNPYNLLSTLPPSHPWYTVLDLKDAFFCLRLHSESQLLFAFEWRDPEIGLSGQLTWTRLPQGFKNSPTLFNEALHSDLADFRVRYPALVLLQYVDDLLLAAATRTECLEGTKALLETLGNKGYRASAKKAQICLQEVTYLGYSLKDGQRWLTKARKEAILSIPVPKNSRQVREFLGKAGYCRLFIPGFAELAAPLYPLTRPGTLFQWGTEQQLAFEDIKKALLSSPALGLPDITKPFELFIDENSGFAKGVLVQKLGPWKRPVAYLSKKLDTVASGWPPCLRMVAAIAILVKDAGKLTLGQPLTILTSHPVEALVRQPPNKWLSNARMTHYQAMLLDAERVHFGPTVSLNPATLLPLPSGGNHHDCLQILAETHGTRPDLTDQPLPDADLTWYTDGSSFIRNGEREAGAAVTTESEVIWAAPLPPGTSAQRAELIALTQALKMAEGKKLTVYTDSRYAFATTHVHGEIYRRRGWLTSEGKEIKNKNEILALLEALFLPKRLSIIHCPGHQKGDSPQAKGNRLADDTAKKAATETHSSLTVLPAGKRTADGSEFEKRTADGSEFESPKKKAKVE

SEQ ID NO: 7310 - protein, 2094 aa, synthetic construct
MPAAKRVKLDGGDKKYSIGLDIGTNSVGWAVITDEYKVPSKKFKVLGNTDRHSIKKNLIGALLFDSGETAEATRLKRTARRRYTRRKNRICYLQEIFSNEMAKVDDSFFHRLEESFLVEEDKKHERHPIFGNIVDEVAYHEKYPTIYHLRKKLVDSTDKADLRLIYLALAHMIKFRGHFLIEGDLNPDNSDVDKLFIQLVQTYNQLFEENPINASGVDAKAILSARLSKSRRLENLIAQLPGEKKNGLFGNLIALSLGLTPNFKSNFDLAEDAKLQLSKDTYDDDLDNLLAQIGDQYADLFLAAKNLSDAILLSDILRVNTEITKAPLSASMIKRYDEHHQDLTLLKALVRQQLPEKYKEIFFDQSKNGYAGYIDGGASQEEFYKFIKPILEKMDGTEELLVKLNREDLLRKQRTFDNGSIPHQIHLGELHAILRRQEDFYPFLKDNREKIEKILTFRIPYYVGPLARGNSRFAWMTRKSEETITPWNFEEVVDKGASAQSFIERMTNFDKNLPNEKVLPKHSLLYEYFTVYNELTKVKYVTEGMRKPAFLSGEQKKAIVDLLFKTNRKVTVKQLKEDYFKKIECFDSVEISGVEDRFNASLGTYHDLLKIIKDKDFLDNEENEDILEDIVLTLTLFEDREMIEERLKTYAHLFDDKVMKQLKRRRYTGWGRLSRKLINGIRDKQSGKTILDFLKSDGFANRNFMQLIHDDSLTFKEDIQKAQVSGQGDSLHEHIANLAGSPAIKKGILQTVKVVDELVKVMGRHKPENIVIEMARENQTTQKGQKNSRERMKRIEEGIKELGSQILKEHPVENTQLQNEKLYLYYLQNGRDMYVDQELDINRLSDYDVDHIVPQSFLKDDSIDNKVLTRSDKARGKSDNVPSEEVVKKMKNYWRQLLNAKLITQRKFDNLTKAERGGLSELDKAGFIKRQLVETRQITKHVAQILDSRMNTKYDENDKLIREVKVITLKSKLVSDFRKDFQFYKVREINNYHHAHDAYLNAVVGTALIKKYPKLESEFVYGDYKVYDVRKMIAKSEQEIGKATAKYFFYSNIMNFFKTEITLANGEIRKRPLIETNGETGEIVWDKGRDFATVRKVLSMPQVNIVKKTEVQTGGFSKESILPKRNSDKLIARKKDWDPKKYGGFDSPTVAYSVLVVAKVEKGKSKKLKSVKELLGITIMERSSFEKNPIDFLEAKGYKEVKKDLIIKLPKYSLFELENGRKRMLASAGELQKGNELALPSKYVNFLYLASHYEKLKGSPEDNEQKQLFVEQHKHYLDEIIEQISEFSKRVILADANLDKVLSAYNKHRDKPIREQAENIIHLFTLTNLGAPAAFKYFDTTIDRKRYTSTKEVLDATLIHQSITGLYETRIDLSQLGGDGGGSSEAAAKGGGGGVLNLEEEYRLHEKPVPSSIDPSWLQLFPTVWAERAGMGLANQVPPVVVELRSGASPVAVRQYPMSKEAREGIRPHIQKFLDLGVLVPCRSPWNTPLLPVKKPGTNDYRPVQDLREINKRVQDIHPTVPNPYNLLSSLPPSYTWYSVLDLKDAFFCLRLHPNSQPLFAFEWKDPEKGNTGQLTWTRLPQGFKNSPTLFNEALHRDLAPFRALNPQVVLLQYVDDLLVAAPTYEDCKKGTQKLLQELSKLGYRVSAKKAQLCQREVTYLGYLLKEGKRWLTPARKATVMKIPVPTTPRQVREFLGKAGFCRLFIPGFASLAAPLYPLTKPSIPFIWTEEHQQAFDHIKKALLSAPALALPDLTKPFTLYIDERAGVARGVLTQTLGPWRRPVAYLSKKLDPVASGWPTCLKAVAAVALLLKDADKLTLGQNVTVIASHSLESIVRQPPDRWMTNARMTHYQSLLLNERVSFAPPAVLNPATLLPVESEATPVHRCSEILAEETGTRRDLEDQPLPGVPTWYTDGSSFITEGKRRAGAPIVDGKRTVWASSLPEGTSAQKAELVALTQALRLAEGKNINIYTDSRYAFATAHIHGAIYKQRGWLTSAGKDIKNKEEILALLEAIHLPRRVAIIHCPGHQRGSNPVATGNRRADEAAKQAALSTRVLAGTTKPAGKRTADGSEFEKRTADGSEFESPKKKAKVE

SEQ ID NO: 7311 - protein, 2218 aa, synthetic construct
MPAAKRVKLDGGDKKYSIGLDIGTNSVGWAVITDEYKVPSKKFKVLGNTDRHSIKKNLIGALLFDSGETAEATRLKRTARRRYTRRKNRICYLQEIFSNEMAKVDDSFFHRLEESFLVEEDKKHERHPIFGNIVDEVAYHEKYPTIYHLRKKLVDSTDKADLRLIYLALAHMIKFRGHFLIEGDLNPDNSDVDKLFIQLVQTYNQLFEENPINASGVDAKAILSARLSKSRRLENLIAQLPGEKKNGLFGNLIALSLGLTPNFKSNFDLAEDAKLQLSKDTYDDDLDNLLAQIGDQYADLFLAAKNLSDAILLSDILRVNTEITKAPLSASMIKRYDEHHQDLTLLKALVRQQLPEKYKEIFFDQSKNGYAGYIDGGASQEEFYKFIKPILEKMDGTEELLVKLNREDLLRKQRTFDNGSIPHQIHLGELHAILRRQEDFYPFLKDNREKIEKILTFRIPYYVGPLARGNSRFAWMTRKSEETITPWNFEEVVDKGASAQSFIERMTNFDKNLPNEKVLPKHSLLYEYFTVYNELTKVKYVTEGMRKPAFLSGEQKKAIVDLLFKTNRKVTVKQLKEDYFKKIECFDSVEISGVEDRFNASLGTYHDLLKIIKDKDFLDNEENEDILEDIVLTLTLFEDREMIEERLKTYAHLFDDKVMKQLKRRRYTGWGRLSRKLINGIRDKQSGKTILDFLKSDGFANRNFMQLIHDDSLTFKEDIQKAQVSGQGDSLHEHIANLAGSPAIKKGILQTVKVVDELVKVMGRHKPENIVIEMARENQTTQKGQKNSRERMKRIEEGIKELGSQILKEHPVENTQLQNEKLYLYYLQNGRDMYVDQELDINRLSDYDVDHIVPQSFLKDDSIDNKVLTRSDKARGKSDNVPSEEVVKKMKNYWRQLLNAKLITQRKFDNLTKAERGGLSELDKAGFIKRQLVETRQITKHVAQILDSRMNTKYDENDKLIREVKVITLKSKLVSDFRKDFQFYKVREINNYHHAHDAYLNAVVGTALIKKYPKLESEFVYGDYKVYDVRKMIAKSEQEIGKATAKYFFYSNIMNFFKTEITLANGEIRKRPLIETNGETGEIVWDKGRDFATVRKVLSMPQVNIVKKTEVQTGGFSKESILPKRNSDKLIARKKDWDPKKYGGFDSPTVAYSVLVVAKVEKGKSKKLKSVKELLGITIMERSSFEKNPIDFLEAKGYKEVKKDLIIKLPKYSLFELENGRKRMLASAGELQKGNELALPSKYVNFLYLASHYEKLKGSPEDNEQKQLFVEQHKHYLDEIIEQISEFSKRVILADANLDKVLSAYNKHRDKPIREQAENIIHLFTLTNLGAPAAFKYFDTTIDRKRYTSTKEVLDATLIHQSITGLYETRIDLSQLGGDGGGSSEAAAKGGGGGTLGDQGSRGSDPLPEPRVTLTVEGIPTEFLVNTGAEHSVLTKPMGKMGSKRTVVAGATGSKVYPWTTKRLLKIGQKQVTHSFLVIPECPAPLLGRDLLTKLKAQIQFSTEGPQVTWEDRPAMCLVLNLEEEYRLHEKPVPPSIDPSWLQLFPMVWAEKAGMGLANQVPPVVVELKSDASPVAVRQYPMSKEAREGIRPHIQRFLDLGILVPCQSPWNTPLLPVKKPGTNDYRPVQDLREVNKRVQDIHPTVPNPYNLLSSLPPSHTWYSVLDLKDAFFCLKLHPNSQPLFAFEWRDPEKGNTGQLTWTRLPQGFKNSPTLFNEALHRDLASFRALNPQVVMLQYVDDLLVAAPTYRDCKEGTRRLLQELSKLGYRVSAKKAQLCREEVTYLGYLLKGGKRWLTPARKATVMKIPTPTTPRQVREFLGTAGFCRLWIPGFASLAAPLYPLTRPKVPFTWTEAHQEAFGRIKEALLSAPALALPDLTKPFALYVDEKEGVARGVLTQTLGPWRRPVAYLSKKLDPVASGWPTCLKAIAAVALLLKDADKLTLGQNVLVIAPHNLESIVRQPPDRWMTNARMTHYQSLLLNERVSFAPPAILNPATLLPVESDDTPIHICSEILAEETGTRPDLRDQPLPGVPAWYTDGSSFIMDGRRQAGAAIVDNKRTVWASNLPEGTSAQKAELIALTQALRLAEGKSINIYTDSRYAFATAHVHGAIYKQRGWLTSAGKDIKNKEEILALLEAIHLPKRVAIIHCPGHQRGTDPVATGNRKADEAAKQAAQSTRILTETTKNAGKRTADGSEFEKRTADGSEFESPKKKAKVE

SEQ ID NO: 7312 - protein, 2096 aa, synthetic construct
MPAAKRVKLDGGDKKYSIGLDIGTNSVGWAVITDEYKVPSKKFKVLGNTDRHSIKKNLIGALLFDSGETAEATRLKRTARRRYTRRKNRICYLQEIFSNEMAKVDDSFFHRLEESFLVEEDKKHERHPIFGNIVDEVAYHEKYPTIYHLRKKLVDSTDKADLRLIYLALAHMIKFRGHFLIEGDLNPDNSDVDKLFIQLVQTYNQLFEENPINASGVDAKAILSARLSKSRRLENLIAQLPGEKKNGLFGNLIALSLGLTPNFKSNFDLAEDAKLQLSKDTYDDDLDNLLAQIGDQYADLFLAAKNLSDAILLSDILRVNTEITKAPLSASMIKRYDEHHQDLTLLKALVRQQLPEKYKEIFFDQSKNGYAGYIDGGASQEEFYKFIKPILEKMDGTEELLVKLNREDLLRKQRTFDNGSIPHQIHLGELHAILRRQEDFYPFLKDNREKIEKILTFRIPYYVGPLARGNSRFAWMTRKSEETITPWNFEEVVDKGASAQSFIERMTNFDKNLPNEKVLPKHSLLYEYFTVYNELTKVKYVTEGMRKPAFLSGEQKKAIVDLLFKTNRKVTVKQLKEDYFKKIECFDSVEISGVEDRFNASLGTYHDLLKIIKDKDFLDNEENEDILEDIVLTLTLFEDREMIEERLKTYAHLFDDKVMKQLKRRRYTGWGRLSRKLINGIRDKQSGKTILDFLKSDGFANRNFMQLIHDDSLTFKEDIQKAQVSGQGDSLHEHIANLAGSPAIKKGILQTVKVVDELVKVMGRHKPENIVIEMARENQTTQKGQKNSRERMKRIEEGIKELGSQILKEHPVENTQLQNEKLYLYYLQNGRDMYVDQELDINRLSDYDVDHIVPQSFLKDDSIDNKVLTRSDKARGKSDNVPSEEVVKKMKNYWRQLLNAKLITQRKFDNLTKAERGGLSELDKAGFIKRQLVETRQITKHVAQILDSRMNTKYDENDKLIREVKVITLKSKLVSDFRKDFQFYKVREINNYHHAHDAYLNAVVGTALIKKYPKLESEFVYGDYKVYDVRKMIAKSEQEIGKATAKYFFYSNIMNFFKTEITLANGEIRKRPLIETNGETGEIVWDKGRDFATVRKVLSMPQVNIVKKTEVQTGGFSKESILPKRNSDKLIARKKDWDPKKYGGFDSPTVAYSVLVVAKVEKGKSKKLKSVKELLGITIMERSSFEKNPIDFLEAKGYKEVKKDLIIKLPKYSLFELENGRKRMLASAGELQKGNELALPSKYVNFLYLASHYEKLKGSPEDNEQKQLFVEQHKHYLDEIIEQISEFSKRVILADANLDKVLSAYNKHRDKPIREQAENIIHLFTLTNLGAPAAFKYFDTTIDRKRYTSTKEVLDATLIHQSITGLYETRIDLSQLGGDGGGSSEAAAKGGGGGLGIEDEYRLHETSTEPDVSLGSTWLSDFPQAWAETGGMGLAVRQAPLIIPLKATSTPVSIQQYPMSHEARLGIKPHIQRLLDQGILVPCQSPWNTPLLPVKKPGTNDYRPVQDLREVNKRVEDIHPTVPNPYNLLSGLPPSHQWYTVLDLKDAFFCLRLHPTSQPLFAFEWRDPGMGISGQLTWTRLPQGFKNSPTLFNEALHRDLADFRIQHPDLILLQYVDDILLAATSELDCQQGTRALLQTLGDLGYRASAKKAQICQKQVKYLGYLLREGQRWLTEARKETVMGQPVPKTPRQLREFLGKAGFCRLFIPGFAEMAAPLYPLTKPGTLFSWGPDQQKAYQEIKQALLTAPALGLPDLTKPFELFVDEKQGYAKGVLTQKLGPWRRPVAYLSKKLDPVAAGWPPCLRMVAAIAVLTKDAGKLTMGQPLVILAPHAVEALVKQPPDRWLSNARMTHYQAMLLDTDRVQFGPVVALNPATLLPLPEEGAPHDCLEILAETHGTRPDLTDQPIPDADHTWYTDGSSFLQEGQRKAGAAVTTETEVIWAGALPAGTSAQRAELIALTQALKMAEGKRLNVYTDSRYAFATAHIHGEIYRRRGWLTSEGREIKNKSEILALLKALFLPKRLSIIHCLGHQKGDSAEARGNRLADQAAREAAIKTPPDTSTLLIAGKRTADGSEFEKRTADGSEFESPKKKAKVE

SEQ ID NO: 7313 - protein, 2116 aa, synthetic construct
MPAAKRVKLDGGDKKYSIGLDIGTNSVGWAVITDEYKVPSKKFKVLGNTDRHSIKKNLIGALLFDSGETAEATRLKRTARRRYTRRKNRICYLQEIFSNEMAKVDDSFFHRLEESFLVEEDKKHERHPIFGNIVDEVAYHEKYPTIYHLRKKLVDSTDKADLRLIYLALAHMIKFRGHFLIEGDLNPDNSDVDKLFIQLVQTYNQLFEENPINASGVDAKAILSARLSKSRRLENLIAQLPGEKKNGLFGNLIALSLGLTPNFKSNFDLAEDAKLQLSKDTYDDDLDNLLAQIGDQYADLFLAAKNLSDAILLSDILRVNTEITKAPLSASMIKRYDEHHQDLTLLKALVRQQLPEKYKEIFFDQSKNGYAGYIDGGASQEEFYKFIKPILEKMDGTEELLVKLNREDLLRKQRTFDNGSIPHQIHLGELHAILRRQEDFYPFLKDNREKIEKILTFRIPYYVGPLARGNSRFAWMTRKSEETITPWNFEEVVDKGASAQSFIERMTNFDKNLPNEKVLPKHSLLYEYFTVYNELTKVKYVTEGMRKPAFLSGEQKKAIVDLLFKTNRKVTVKQLKEDYFKKIECFDSVEISGVEDRFNASLGTYHDLLKIIKDKDFLDNEENEDILEDIVLTLTLFEDREMIEERLKTYAHLFDDKVMKQLKRRRYTGWGRLSRKLINGIRDKQSGKTILDFLKSDGFANRNFMQLIHDDSLTFKEDIQKAQVSGQGDSLHEHIANLAGSPAIKKGILQTVKVVDELVKVMGRHKPENIVIEMARENQTTQKGQKNSRERMKRIEEGIKELGSQILKEHPVENTQLQNEKLYLYYLQNGRDMYVDQELDINRLSDYDVDHIVPQSFLKDDSIDNKVLTRSDKARGKSDNVPSEEVVKKMKNYWRQLLNAKLITQRKFDNLTKAERGGLSELDKAGFIKRQLVETRQITKHVAQILDSRMNTKYDENDKLIREVKVITLKSKLVSDFRKDFQFYKVREINNYHHAHDAYLNAVVGTALIKKYPKLESEFVYGDYKVYDVRKMIAKSEQEIGKATAKYFFYSNIMNFFKTEITLANGEIRKRPLIETNGETGEIVWDKGRDFATVRKVLSMPQVNIVKKTEVQTGGFSKESILPKRNSDKLIARKKDWDPKKYGGFDSPTVAYSVLVVAKVEKGKSKKLKSVKELLGITIMERSSFEKNPIDFLEAKGYKEVKKDLIIKLPKYSLFELENGRKRMLASAGELQKGNELALPSKYVNFLYLASHYEKLKGSPEDNEQKQLFVEQHKHYLDEIIEQISEFSKRVILADANLDKVLSAYNKHRDKPIREQAENIIHLFTLTNLGAPAAFKYFDTTIDRKRYTSTKEVLDATLIHQSITGLYETRIDLSQLGGDGGGSSEAAAKGGGGGTLNIEDEYRLHETSKEPDVSLGSTWLSDFPQAWAETGGMGLAVRQAPLIIPLKATSTPVSIKQYPMSQEARLGIKPHIQRLLDQGILVPCQSPWNTPLLPVKKPGTNDYRPVQDLREVNKRVEDIHPTVPNPYNLLSGLPPSHQWYTVLDLKDAFFCLRLHPTSQPLFAFEWRDPEMGISGQLTWTRLPQGFKNSPTLFNEALHRDLADFRIQHPDLILLQYVDDLLLAATSELDCQQGTRALLQTLGNLGYRASAKKAQICQKQVKYLGYLLKEGQRWLTEARKETVMGQPTPKTPRQLREFLGKAGFCRLFIPGFAEMAAPLYPLTKPGTLFNWGPDQQKAYQEIKQALLTAPALGLPDLTKPFELFVDEKQGYAKGVLTQKLGPWRRPVAYLSKKLDPVAAGWPPCLRMVAAIAVLTKDAGKLTMGQPLVILAPHAVEALVKQPPDRWLSNARMTHYQALLLDTDRVQFGPVVALNPATLLPLPEEGLQHNCLDILAEAHGTRPDLTDQPLPDADHTWYTDGSSLLQEGQRKAGAAVTTETEVIWAKALPAGTSAQRAELIALTQALKMAEGKKLNVYTDSRYAFATAHIHGEIYRRRGWLTSEGKEIKNKDEILALLKALFLPKRLSIIHCPGHQKGHSAEARGNRMADQAARKAAITETPDTSTLLIENSSPSGGSKRTADGSEFEAGKRTADGSEFEKRTADGSEFESPKKKAKVE

SEQ ID NO: 7314 - protein, 2116 aa, synthetic construct; identical to SEQ ID NO: 7313

SEQ ID NO: 7315 - protein, 2087 aa, synthetic construct
MPAAKRVKLDGGDKKYSIGLDIGTNSVGWAVITDEYKVPSKKFKVLGNTDRHSIKKNLIGALLFDSGETAEATRLKRTARRRYTRRKNRICYLQEIFSNEMAKVDDSFFHRLEESFLVEEDKKHERHPIFGNIVDEVAYHEKYPTIYHLRKKLVDSTDKADLRLIYLALAHMIKFRGHFLIEGDLNPDNSDVDKLFIQLVQTYNQLFEENPINASGVDAKAILSARLSKSRRLENLIAQLPGEKKNGLFGNLIALSLGLTPNFKSNFDLAEDAKLQLSKDTYDDDLDNLLAQIGDQYADLFLAAKNLSDAILLSDILRVNTEITKAPLSASMIKRYDEHHQDLTLLKALVRQQLPEKYKEIFFDQSKNGYAGYIDGGASQEEFYKFIKPILEKMDGTEELLVKLNREDLLRKQRTFDNGSIPHQIHLGELHAILRRQEDFYPFLKDNREKIEKILTFRIPYYVGPLARGNSRFAWMTRKSEETITPWNFEEVVDKGASAQSFIERMTNFDKNLPNEKVLPKHSLLYEYFTVYNELTKVKYVTEGMRKPAFLSGEQKKAIVDLLFKTNRKVTVKQLKEDYFKKIECFDSVEISGVEDRFNASLGTYHDLLKIIKDKDFLDNEENEDILEDIVLTLTLFEDREMIEERLKTYAHLFDDKVMKQLKRRRYTGWGRLSRKLINGIRDKQSGKTILDFLKSDGFANRNFMQLIHDDSLTFKEDIQKAQVSGQGDSLHEHIANLAGSPAIKKGILQTVKVVDELVKVMGRHKPENIVIEMARENQTTQKGQKNSRERMKRIEEGIKELGSQILKEHPVENTQLQNEKLYLYYLQNGRDMYVDQELDINRLSDYDVDHIVPQSFLKDDSIDNKVLTRSDKARGKSDNVPSEEVVKKMKNYWRQLLNAKLITQRKFDNLTKAERGGLSELDKAGFIKRQLVETRQITKHVAQILDSRMNTKYDENDKLIREVKVITLKSKLVSDFRKDFQFYKVREINNYHHAHDAYLNAVVGTALIKKYPKLESEFVYGDYKVYDVRKMIAKSEQEIGKATAKYFFYSNIMNFFKTEITLANGEIRKRPLIETNGETGEIVWDKGRDFATVRKVLSMPQVNIVKKTEVQTGGFSKESILPKRNSDKLIARKKDWDPKKYGGFDSPTVAYSVLVVAKVEKGKSKKLKSVKELLGITIMERSSFEKNPIDFLEAKGYKEVKKDLIIKLPKYSLFELENGRKRMLASAGELQKGNELALPSKYVNFLYLASHYEKLKGSPEDNEQKQLFVEQHKHYLDEIIEQISEFSKRVILADANLDKVLSAYNKHRDKPIREQAENIIHLFTLTNLGAPAAFKYFDTTIDRKRYTSTKEVLDATLIHQSITGLYETRIDLSQLGGDGGGSSEAAAKGGGGGIPWLMKKPLQLTTLVPLQEYEERLLKQTMLTGSYKEKLQSLFLKYDALWQHWENQVGHRRIKPHHIATGTVNPRPQKQYPINPKAKASIQTVINDLLKQGVLIQQNSIMNTPVYPVPKPDGKWRMVLDYREVNKTIPLIAAQNQHSAGILSSIFRGKYKTTLDLSNGFWAHSITPESYWLTAFTWLGQQYCWTRLPQGFLNSPALFNADVVDLLKEVPNVQVYVDDIYISHDDPREHLEQLEKVFSLLLNAGYVVSLKKSEIAQHEVEFLGFNITKEGRGLTETFKQKLLNITPPRDLKQLQSILGLLNFARNFIPNFSELVKPLYNIIATAPGKYITWTTDNSQQLQNIISMLNSAENLEERNPEVRLIMKVNTSPSAGYIRFYNEFAKRPIMYLNYVYTKAEVKFTNTEKLLTTIHKGLIKALDLGMGQEILVYSPIVSMTKIQKTPLPERKALPIRWITWMSYLEDPRIQFHYDKTLPELQQVPTVTDDIIAKIKHPSEFSMVFYTDGSAIKHPNVNKSHNAGMGIAQVQFKPEFTVINTWSIPLGDHTAQLAEVAAVEFACKKALKIDGPVLIVTDSFYVAESVNKELPYWQSNGFFNNKKKPLKHVSKWKSIADCIQLKPDIIIIHEKGHQPTASTFHTEGNNLADKLATQGSYVVNAGKRTADGSEFEKRTADGSEFESPKKKAKVE

SEQ ID NO: 7316 - protein, 2096 aa, synthetic construct
MPAAKRVKLDGGDKKYSIGLDIGTNSVGWAVITDEYKVPSKKFKVLGNTDRHSIKKNLIGALLFDSGETAEATRLKRTARRRYTRRKNRICYLQEIFSNEMAKVDDSFFHRLEESFLVEEDKKHERHPIFGNIVDEVAYHEKYPTIYHLRKKLVDSTDKADLRLIYLALAHMIKFRGHFLIEGDLNPDNSDVDKLFIQLVQTYNQLFEENPINASGVDAKAILSARLSKSRRLENLIAQLPGEKKNGLFGNLIALSLGLTPNFKSNFDLAEDAKLQLSKDTYDDDLDNLLAQIGDQYADLFLAAKNLSDAILLSDILRVNTEITKAPLSASMIKRYDEHHQDLTLLKALVRQQLPEKYKEIFFDQSKNGYAGYIDGGASQEEFYKFIKPILEKMDGTEELLVKLNREDLLRKQRTFDNGSIPHQIHLGELHAILRRQEDFYPFLKDNREKIEKILTFRIPYYVGPLARGNSRFAWMTRKSEETITPWNFEEVVDKGASAQSFIERMTNFDKNLPNEKVLPKHSLLYEYFTVYNELTKVKYVTEGMRKPAFLSGEQKKAIVDLLFKTNRKVTVKQLKEDYFKKIECFDSVEISGVEDRFNASLGTYHDLLKIIKDKDFLDNEENEDILEDIVLTLTLFEDREMIEERLKTYAHLFDDKVMKQLKRRRYTGWGRLSRKLINGIRDKQSGKTILDFLKSDGFANRNFMQLIHDDSLTFKEDIQKAQVSGQGDSLHEHIANLAGSPAIKKGILQTVKVVDELVKVMGRHKPENIVIEMARENQTTQKGQKNSRERMKRIEEGIKELGSQILKEHPVENTQLQNEKLYLYYLQNGRDMYVDQELDINRLSDYDVDHIVPQSFLKDDSIDNKVLTRSDKARGKSDNVPSEEVVKKMKNYWRQLLNAKLITQRKFDNLTKAERGGLSELDKAGFIKRQLVETRQITKHVAQILDSRMNTKYDENDKLIREVKVITLKSKLVSDFRKDFQFYKVREINNYHHAHDAYLNAVVGTALIKKYPKLESEFVYGDYKVYDVRKMIAKSEQEIGKATAKYFFYSNIMNFFKTEITLANGEIRKRPLIETNGETGEIVWDKGRDFATVRKVLSMPQVNIVKKTEVQTGGFSKESILPKRNSDKLIARKKDWDPKKYGGFDSPTVAYSVLVVAKVEKGKSKKLKSVKELLGITIMERSSFEKNPIDFLEAKGYKEVKKDLIIKLPKYSLFELENGRKRMLASAGELQKGNELALPSKYVNFLYLASHYEKLKGSPEDNEQKQLFVEQHKHYLDEIIEQISEFSKRVILADANLDKVLSAYNKHRDKPIREQAENIIHLFTLTNLGAPAAFKYFDTTIDRKRYTSTKEVLDATLIHQSITGLYETRIDLSQLGGDGGGSSEAAAKGGGGGTLNIEDEYRLHETSKEPDVPLGSTWLSDFPQAWAETGGMGLAVRQAPLIIPLKATSTPVSIKQYPMSQEARLGIKPHIQRLLDQGILVPCQSPWNTPLLPVKKPGTNDYRPVQDLREVNKRVEDIHPTVPNPYNLLSGLPPSHQWYTVLDLKDAFFCLRLHPTSQPLFAFEWRDPEMGISGQLTWTRLPQGFKNSPTLFNEALHRDLADFRIQHPDLILLQYVDDLLLAATSEQDCQRGTRALLQTLGNLGYRASAKKAQICQKQVKYLGYLLKEGQRWLTEARKETVMGQPTPKTPRQLREFLGTAGFCRLWIPGFAEMAAPLYPLTKPGTLFNWGPDQQKAYQEIKQALLTAPALGLPDLTKPFELFVDEKQGYAKGVLTQKLGPWRRPVAYLSKKLDPVAAGWPPCLRMVAAIAVLTKDAGKLTMGQPLVILAPHAVEALVKQPPDRWLSNARMTHYQAMLLDTDRVQFGPVVALNPATLLPLPEKEAPHDCLEILAETHGTRPDLTDQPIPDADYTWYTDGSSFLQEGQRRAGAAVTTETEVIWARALPAGTSAQRAELIALTQALKMAEGKKLNVYTDSRYAFATAHVHGEIYRRRGWLTSEGREIKNKNEILALLKALFLPKRLSIIHCPGHQKGNSAEARGNRMADQAAREAAMKAVLETSTLLAGKRTADGSEFEKRTADGSEFESPKKKAKVE

SEQ ID NO: 7317 - protein, 2096 aa, synthetic construct
MPAAKRVKLDGGDKKYSIGLDIGTNSVGWAVITDEYKVPSKKFKVLGNTDRHSIKKNLIGALLFDSGETAEATRLKRTARRRYTRRKNRICYLQEIFSNEMAKVDDSFFHRLEESFLVEEDKKHERHPIFGNIVDEVAYHEKYPTIYHLRKKLVDSTDKADLRLIYLALAHMIKFRGHFLIEGDLNPDNSDVDKLFIQLVQTYNQLFEENPINASGVDAKAILSARLSKSRRLENLIAQLPGEKKNGLFGNLIALSLGLTPNFKSNFDLAEDAKLQLSKDTYDDDLDNLLAQIGDQYADLFLAAKNLSDAILLSDILRVNTEITKAPLSASMIKRYDEHHQDLTLLKALVRQQLPEKYKEIFFDQSKNGYAGYIDGGASQEEFYKFIKPILEKMDGTEELLVKLNREDLLRKQRTFDNGSIPHQIHLGELHAILRRQEDFYPFLKDNREKIEKILTFRIPYYVGPLARGNSRFAWMTRKSEETITPWNFEEVVDKGASAQSFIERMTNFDKNLPNEKVLPKHSLLYEYFTVYNELTKVKYVTEGMRKPAFLSGEQKKAIVDLLFKTNRKVTVKQLKEDYFKKIECFDSVEISGVEDRFNASLGTYHDLLKIIKDKDFLDNEENEDILEDIVLTLTLFEDREMIEERLKTYAHLFDDKVMKQLKRRRYTGWGRLSRKLINGIRDKQSGKTILDFLKSDGFANRNFMQLIHDDSLTFKEDIQKAQVSGQGDSLHEHIANLAGSPAIKKGILQTVKVVDELVKVMGRHKPENIVIEMARENQTTQKGQKNSRERMKRIEEGIKELGSQILKEHPVENTQLQNEKLYLYYLQNGRDMYVDQELDINRLSDYDVDHIVPQSFLKDDSIDNKVLTRSDKARGKSDNVPSEEVVKKMKNYWRQLLNAKLITQRKFDNLTKAERGGLSELDKAGFIKRQLVETRQITKHVAQILDSRMNTKYDENDKLIREVKVITLKSKLVSDFRKDFQFYKVREINNYHHAHDAYLNAVVGTALIKKYPKLESEFVYGDYKVYDVRKMIAKSEQEIGKATAKYFFYSNIMNFFKTEITLANGEIRKRPLIETNGETGEIVWDKGRDFATVRKVLSMPQVNIVKKTEVQTGGFSKESILPKRNSDKLIARKKDWDPKKYGGFDSPTVAYSVLVVAKVEKGKSKKLKSVKELLGITIMERSSFEKNPIDFLEAKGYKEVKKDLIIKLPKYSLFELENGRKRMLASAGELQKGNELALPSKYVNFLYLASHYEKLKGSPEDNEQKQLFVEQHKHYLDEIIEQISEFSKRVILADANLDKVLSAYNKHRDKPIREQAENIIHLFTLTNLGAPAAFKYFDTTIDRKRYTSTKEVLDATLIHQSITGLYETRIDLSQLGGDGGGSSEAAAKGGGGGTLNIEDEYRLHETSKEPDVPLGSTWLSDFPQAWAETGGMGLAVRQAPLIIPLKATSTPVSIKQYPMSQEARLGIKPHIQRLLDQGILVPCQSPWNTPLLPVKKPGTNDYRPVQDLREVNKRVEDIHPTVPNPYNLLSGLPPSHQWYTVLDLKDAFFCLRLHPTSQPLFAFEWRDPEMGISGQLTWTRLPQGFKNSPTLFNEALHRDLADFRIQHPDLILLQYVDDLLLAATSEQDCQRGTRALLQTLGNLGYRASAKKAQICQKQVKYLGYLLKEGQRWLTEARKETVMGQPTPKTPRQLREFLGKAGFCRLFIPGFAEMAAPLYPLTKPGTLFNWGPDQQKAYQEIKQALLTAPALGLPDLTKPFELFVDEKQGYAKGVLTQKLGPWRRPVAYLSKKLDPVAAGWPPCLRMVAAIAVLTKDAGKLTMGQPLVILAPHAVEALVKQPPDRWLSNARMTHYQAMLLDTDRVQFGPVVALNPATLLPLPEKEAPHDCLEILAETHGTRPDLTDQPIPDADYTWYTDGSSFLQEGQRRAGAAVTTETEVIWARALPAGTSAQRAELIALTQALKMAEGKKLNVYTDSRYAFATAHVHGEIYRRRGWLTSEGREIKNKNEILALLKALFLPKRLSIIHCPGHQKGNSAEARGNRMADQAAREAAMKAVLETSTLLAGKRTADGSEFEKRTADGSEFESPKKKAKVE

SEQ ID NO: 7318 - protein, 2098 aa, synthetic construct
MPAAKRVKLDGGDKKYSIGLDIGTNSVGWAVITDEYKVPSKKFKVLGNTDRHSIKKNLIGALLFDSGETAEATRLKRTARRRYTRRKNRICYLQEIFSNEMAKVDDSFFHRLEESFLVEEDKKHERHPIFGNIVDEVAYHEKYPTIYHLRKKLVDSTDKADLRLIYLALAHMIKFRGHFLIEGDLNPDNSDVDKLFIQLVQTYNQLFEENPINASGVDAKAILSARLSKSRRLENLIAQLPGEKKNGLFGNLIALSLGLTPNFKSNFDLAEDAKLQLSKDTYDDDLDNLLAQIGDQYADLFLAAKNLSDAILLSDILRVNTEITKAPLSASMIKRYDEHHQDLTLLKALVRQQLPEKYKEIFFDQSKNGYAGYIDGGASQEEFYKFIKPILEKMDGTEELLVKLNREDLLRKQRTFDNGSIPHQIHLGELHAILRRQEDFYPFLKDNREKIEKILTFRIPYYVGPLARGNSRFAWMTRKSEETITPWNFEEVVDKGASAQSFIERMTNFDKNLPNEKVLPKHSLLYEYFTVYNELTKVKYVTEGMRKPAFLSGEQKKAIVDLLFKTNRKVTVKQLKEDYFKKIECFDSVEISGVEDRFNASLGTYHDLLKIIKDKDFLDNEENEDILEDIVLTLTLFEDREMIEERLKTYAHLFDDKVMKQLKRRRYTGWGRLSRKLINGIRDKQSGKTILDFLKSDGFANRNFMQLIHDDSLTFKEDIQKAQVSGQGDSLHEHIANLAGSPAIKKGILQTVKVVDELVKVMGRHKPENIVIEMARENQTTQKGQKNSRERMKRIEEGIKELGSQILKEHPVENTQLQNEKLYLYYLQNGRDMYVDQELDINRLSDYDVDHIVPQSFLKDDSIDNKVLTRSDKARGKSDNVPSEEVVKKMKNYWRQLLNAKLITQRKFDNLTKAERGGLSELDKAGFIKRQLVETRQITKHVAQILDSRMNTKYDENDKLIREVKVITLKSKLVSDFRKDFQFYKVREINNYHHAHDAYLNAVVGTALIKKYPKLESEFVYGDYKVYDVRKMIAKSEQEIGKATAKYFFYSNIMNFFKTEITLANGEIRKRPLIETNGETGEIVWDKGRDFATVRKVLSMPQVNIVKKTEVQTGGFSKESILPKRNSDKLIARKKDWDPKKYGGFDSPTVAYSVLVVAKVEKGKSKKLKSVKELLGITIMERSSFEKNPIDFLEAKGYKEVKKDLIIKLPKYSLFELENGRKRMLASAGELQKGNELALPSKYVNFLYLASHYEKLKGSPEDNEQKQLFVEQHKHYLDEIIEQISEFSKRVILADANLDKVLSAYNKHRDKPIREQAENIIHLFTLTNLGAPAAFKYFDTTIDRKRYTSTKEVLDATLIHQSITGLYETRIDLSQLGGDGGEAAAKGGGGSSGGTAPLEEEYRLFLEAPIQNVTLLEQWKREIPKVWAEINPPGLASTQAPIHVQLLSTALPVRVRQYPITLEAKRSLRETIRKFRAAGILRPVHSPWNTPLLPVRKSGTSEYRMVQDLREVNKRVETIHPTVPNPYTLLSLLPPDRIWYSVLDLKDAFFCIPLAPESQLIFAFEWADAEEGESGQLTWTRLPQGFKNSPTLFDEALNRDLQGFRLDHPSVSLLQYVDDLLIAADTQAACLSATRDLLMTLAELGYRVSGKKAQLCQEEVTYLGFKIHKGSRSLSNSRTQAILQIPVPKTKRQVREFLGTIGYCRLWIPGFAELAQPLYAATRGGNDPLVWGEKEEEAFQSLKLALTQPPALALPSLDKPFQLFVEETSGAAKGVLTQALGPWKRPVAYLSKRLDPVAAGWPRCLRAIAAAALLTREASKLTFGQDIEITSSHNLESLLRSPPDKWLTNARITQYQVLLLDPPRVRFKQTAALNPATLLPETDDTLPIHHCLDTLDSLTSTRPDLTDQPLAQAEATLFTDGSSYIRDGKRYAGAAVVTLDSVIWAEPLPIGTSAQKAELIALTKALEWSKDKSVNIYTDSRYAFATLHVHGMIYRERGLLTAGGKAIKNAPEILALLTAVWLPKRVAVMHCKGHQKDDAPTSTGNRRADEVAREVAIRPLSTQATISAGKRTADGSEFEKRTADGSEFESPKKKAKVE

SEQ ID NO: 7319 - protein, 2098 aa, synthetic construct
MPAAKRVKLDGGDKKYSIGLDIGTNSVGWAVITDEYKVPSKKFKVLGNTDRHSIKKNLIGALLFDSGETAEATRLKRTARRRYTRRKNRICYLQEIFSNEMAKVDDSFFHRLEESFLVEEDKKHERHPIFGNIVDEVAYHEKYPTIYHLRKKLVDSTDKADLRLIYLALAHMIKFRGHFLIEGDLNPDNSDVDKLFIQLVQTYNQLFEENPINASGVDAKAILSARLSKSRRLENLIAQLPGEKKNGLFGNLIALSLGLTPNFKSNFDLAEDAKLQLSKDTYDDDLDNLLAQIGDQYADLFLAAKNLSDAILLSDILRVNTEITKAPLSASMIKRYDEHHQDLTLLKALVRQQLPEKYKEIFFDQSKNGYAGYIDGGASQEEFYKFIKPILEKMDGTEELLVKLNREDLLRKQRTFDNGSIPHQIHLGELHAILRRQEDFYPFLKDNREKIEKILTFRIPYYVGPLARGNSRFAWMTRKSEETITPWNFEEVVDKGASAQSFIERMTNFDKNLPNEKVLPKHSLLYEYFTVYNELTKVKYVTEGMRKPAFLSGEQKKAIVDLLFKTNRKVTVKQLKEDYFKKIECFDSVEISGVEDRFNASLGTYHDLLKIIKDKDFLDNEENEDILEDIVLTLTLFEDREMIEERLKTYAHLFDDKVMKQLKRRRYTGWGRLSRKLINGIRDKQSGKTILDFLKSDGFANRNFMQLIHDDSLTFKEDIQKAQVSGQGDSLHEHIANLAGSPAIKKGILQTVKVVDELVKVMGRHKPENIVIEMARENQTTQKGQKNSRERMKRIEEGIKELGSQILKEHPVENTQLQNEKLYLYYLQNGRDMYVDQELDINRLSDYDVDHIVPQSFLKDDSIDNKVLTRSDKARGKSDNVPSEEVVKKMKNYWRQLLNAKLITQRKFDNLTKAERGGLSELDKAGFIKRQLVETRQITKHVAQILDSRMNTKYDENDKLIREVKVITLKSKLVSDFRKDFQFYKVREINNYHHAHDAYLNAVVGTALIKKYPKLESEFVYGDYKVYDVRKMIAKSEQEIGKATAKYFFYSNIMNFFKTEITLANGEIRKRPLIETNGETGEIVWDKGRDFATVRKVLSMPQVNIVKKTEVQTGGFSKESILPKRNSDKLIARKKDWDPKKYGGFDSPTVAYSVLVVAKVEKGKSKKLKSVKELLGITIMERSSFEKNPIDFLEAKGYKEVKKDLIIKLPKYSLFELENGRKRMLASAGELQKGNELALPSKYVNFLYLASHYEKLKGSPEDNEQKQLFVEQHKHYLDEIIEQISEFSKRVILADANLDKVLSAYNKHRDKPIREQAENIIHLFTLTNLGAPAAFKYFDTTIDRKRYTSTKEVLDATLIHQSITGLYETRIDLSQLGGDGGEAAAKGGGGSSGGTAPLEEEYRLFLEAPIQNVTLLEQWKREIPKVWAEINPPGLASTQAPIHVQLLSTALPVRVRQYPITLEAKRSLRETIRKFRAAGILRPVHSPWNTPLLPVRKSGTSEYRMVQDLREVNKRVETIHPTVPNPYTLLSLLPPDRIWYSVLDLKDAFFCIPLAPESQLIFAFEWADAEEGESGQLTWTRLPQGFKNSPTLFNEALNRDLQGFRLDHPSVSLLQYVDDLLIAADTQAACLSATRDLLMTLAELGYRVSGKKAQLCQEEVTYLGFKIHKGSRSLSNSRTQAILQIPVPKTKRQVREFLGTIGYCRLWIPGFAELAQPLYAATRPGNDPLVWGEKEEEAFQSLKLALTQPPALALPSLDKPFQLFVEETSGAAKGVLTQALGPWKRPVAYLSKRLDPVAAGWPRCLRAIAAAALLTREASKLTFGQDIEITSSHNLESLLRSPPDKWLTNARITQYQVLLLDPPRVRFKQTAALNPATLLPETDDTLPIHHCLDTLDSLTSTRPDLTDQPLAQAEATLFTDGSSYIRDGKRYAGAAVVTLDSVIWAEPLPIGTSAQKAELIALTKALEWSKDKSVNIYTDSRYAFATLHVHGMIYRERGWLTAGGKAIKNAPEILALLTAVWLPKRVAVMHCKGHQKDDAPTSTGNRRADEVAREVAIRPLSTQATISAGKRTADGSEFEKRTADGSEFESPKKKAKVE

SEQ ID NO: 7320 - protein, 2098 aa, synthetic construct
MPAAKRVKLDGGDKKYSIGLDIGTNSVGWAVITDEYKVPSKKFKVLGNTDRHSIKKNLIGALLFDSGETAEATRLKRTARRRYTRRKNRICYLQEIFSNEMAKVDDSFFHRLEESFLVEEDKKHERHPIFGNIVDEVAYHEKYPTIYHLRKKLVDSTDKADLRLIYLALAHMIKFRGHFLIEGDLNPDNSDVDKLFIQLVQTYNQLFEENPINASGVDAKAILSARLSKSRRLENLIAQLPGEKKNGLFGNLIALSLGLTPNFKSNFDLAEDAKLQLSKDTYDDDLDNLLAQIGDQYADLFLAAKNLSDAILLSDILRVNTEITKAPLSASMIKRYDEHHQDLTLLKALVRQQLPEKYKEIFFDQSKNGYAGYIDGGASQEEFYKFIKPILEKMDGTEELLVKLNREDLLRKQRTFDNGSIPHQIHLGELHAILRRQEDFYPFLKDNREKIEKILTFRIPYYVGPLARGNSRFAWMTRKSEETITPWNFEEVVDKGASAQSFIERMTNFDKNLPNEKVLPKHSLLYEYFTVYNELTKVKYVTEGMRKPAFLSGEQKKAIVDLLFKTNRKVTVKQLKEDYFKKIECFDSVEISGVEDRFNASLGTYHDLLKIIKDKDFLDNEENEDILEDIVLTLTLFEDREMIEERLKTYAHLFDDKVMKQLKRRRYTGWGRLSRKLINGIRDKQSGKTILDFLKSDGFANRNFMQLIHDDSLTFKEDIQKAQVSGQGDSLHEHIANLAGSPAIKKGILQTVKVVDELVKVMGRHKPENIVIEMARENQTTQKGQKNSRERMKRIEEGIKELGSQILKEHPVENTQLQNEKLYLYYLQNGRDMYVDQELDINRLSDYDVDHIVPQSFLKDDSIDNKVLTRSDKARGKSDNVPSEEVVKKMKNYWRQLLNAKLITQRKFDNLTKAERGGLSELDKAGFIKRQLVETRQITKHVAQILDSRMNTKYDENDKLIREVKVITLKSKLVSDFRKDFQFYKVREINNYHHAHDAYLNAVVGTALIKKYPKLESEFVYGDYKVYDVRKMIAKSEQEIGKATAKYFFYSNIMNFFKTEITLANGEIRKRPLIETNGETGEIVWDKGRDFATVRKVLSMPQVNIVKKTEVQTGGFSKESILPKRNSDKLIARKKDWDPKKYGGFDSPTVAYSVLVVAKVEKGKSKKLKSVKELLGITIMERSSFEKNPIDFLEAKGYKEVKKDLIIKLPKYSLFELENGRKRMLASAGELQKGNELALPSKYVNFLYLASHYEKLKGSPEDNEQKQLFVEQHKHYLDEIIEQISEFSKRVILADANLDKVLSAYNKHRDKPIREQAENIIHLFTLTNLGAPAAFKYFDTTIDRKRYTSTKEVLDATLIHQSITGLYETRIDLSQLGGDGGEAAAKGGGGSSGGTAPLEEEYRLFLEAPIQNVTLLEQWKREIPKVWAEINPPGLASTQAPIHVQLLSTALPVRVRQYPITLEAKRSLRETIRKFRAAGILRPVHSPWNTPLLPVRKSGTSEYRMVQDLREVNKRVETIHPTVPNPYTLLSLLPPDRIWYSVLDLKDAFFCIPLAPESQLIFAFEWADAEEGESGQLTWTRLPQGFKNSPTLFNEALNRDLQGFRLDHPSVSLLQYVDDLLIAADTQAACLSATRDLLMTLAELGYRVSGKKAQLCQEEVTYLGFKIHKGSRSLSNSRTQAILQIPVPKTKRQVREFLGKIGYCRLFIPGFAELAQPLYAATRPGNDPLVWGEKEEEAFQSLKLALTQPPALALPSLDKPFQLFVEETSGAAKGVLTQALGPWKRPVAYLSKRLDPVAAGWPRCLRAIAAAALLTREASKLTFGQDIEITSSHNLESLLRSPPDKWLTNARITQYQVLLLDPPRVRFKQTAALNPATLLPETDDTLPIHHCLDTLDSLTSTRPDLTDQPLAQAEATLFTDGSSYIRDGKRYAGAAVVTLDSVIWAEPLPIGTSAQKAELIALTKALEWSKDKSVNIYTDSRYAFATLHVHGMIYRERGWLTAGGKAIKNAPEILALLTAVWLPKRVAVMHCKGHQKDDAPTSTGNRRADEVAREVAIRPLSTQATISAGKRTADGSEFEKRTADGSEFESPKKKAKVE

SEQ ID NO: 7321 - protein, 2102 aa, synthetic construct
MPAAKRVKLDGGDKKYSIGLDIGTNSVGWAVITDEYKVPSKKFKVLGNTDRHSIKKNLIGALLFDSGETAEATRLKRTARRRYTRRKNRICYLQEIFSNEMAKVDDSFFHRLEESFLVEEDKKHERHPIFGNIVDEVAYHEKYPTIYHLRKKLVDSTDKADLRLIYLALAHMIKFRGHFLIEGDLNPDNSDVDKLFIQLVQTYNQLFEENPINASGVDAKAILSARLSKSRRLENLIAQLPGEKKNGLFGNLIALSLGLTPNFKSNFDLAEDAKLQLSKDTYDDDLDNLLAQIGDQYADLFLAAKNLSDAILLSDILRVNTEITKAPLSASMIKRYDEHHQDLTLLKALVRQQLPEKYKEIFFDQSKNGYAGYIDGGASQEEFYKFIKPILEKMDGTEELLVKLNREDLLRKQRTFDNGSIPHQIHLGELHAILRRQEDFYPFLKDNREKIEKILTFRIPYYVGPLARGNSRFAWMTRKSEETITPWNFEEVVDKGASAQSFIERMTNFDKNLPNEKVLPKHSLLYEYFTVYNELTKVKYVTEGMRKPAFLSGEQKKAIVDLLFKTNRKVTVKQLKEDYFKKIECFDSVEISGVEDRFNASLGTYHDLLKIIKDKDFLDNEENEDILEDIVLTLTLFEDREMIEERLKTYAHLFDDKVMKQLKRRRYTGWGRLSRKLINGIRDKQSGKTILDFLKSDGFANRNFMQLIHDDSLTFKEDIQKAQVSGQGDSLHEHIANLAGSPAIKKGILQTVKVVDELVKVMGRHKPENIVIEMARENQTTQKGQKNSRERMKRIEEGIKELGSQILKEHPVENTQLQNEKLYLYYLQNGRDMYVDQELDINRLSDYDVDHIVPQSFLKDDSIDNKVLTRSDKARGKSDNVPSEEVVKKMKNYWRQLLNAKLITQRKFDNLTKAERGGLSELDKAGFIKRQLVETRQITKHVAQILDSRMNTKYDENDKLIREVKVITLKSKLVSDFRKDFQFYKVREINNYHHAHDAYLNAVVGTALIKKYPKLESEFVYGDYKVYDVRKMIAKSEQEIGKATAKYFFYSNIMNFFKTEITLANGEIRKRPLIETNGETGEIVWDKGRDFATVRKVLSMPQVNIVKKTEVQTGGFSKESILPKRNSDKLIARKKDWDPKKYGGFDSPTVAYSVLVVAKVEKGKSKKLKSVKELLGITIMERSSFEKNPIDFLEAKGYKEVKKDLIIKLPKYSLFELENGRKRMLASAGELQKGNELALPSKYVNFLYLASHYEKLKGSPEDNEQKQLFVEQHKHYLDEIIEQISEFSKRVILADANLDKVLSAYNKHRDKPIREQAENIIHLFTLTNLGAPAAFKYFDTTIDRKRYTSTKEVLDATLIHQSITGLYETRIDLSQLGGDGGEAAAKGGGGSSGGTVSLQDEHRLFDIPVTTSLPDVWLQDFPQAWAETGGLGRAKCQAPIIIDLKPTAVPVSIKQYPMSLEAHMGIRQHIIKFLELGVLRPCRSPWNTPLLPVKKPGTQDYRPVQDLREINKRTVDIHPTVPNPYNLLSTLKPDYSWYTVLDLKDAFFCLPLAPQSQELFAFEWKDPERGISGQLTWTRLPQGFKNSPTLFDEALHRDLTDFRTQHPEVTLLQYVDDLLLAAPTKKACTQGTRHLLQELGEKGYRASAKKAQICQTKVTYLGYILSEGKRWLTPGRIETVARIPPPRNPREVREFLGTAGFCRLWIPGFAELAAPLYALTKESTPFTWQTEHQLAFEALKKALLSAPALGLPDTSKPFTLFLDERQGIAKGVLTQKLGPWKRPVAYLSKKLDPVAAGWPPCLRIMAATAMLVKDSAKLTLGQPLTVITPHTLEAIVRQPPDRWITNARLTHYQALLLDTDRVQFGPPVTLNPATLLPVPENQPSPHDCRQVLAETHGTREDLKDQELPDADHTWYTDGSSYLDSGTRRAGAAVVDGHNTIWAQSLPPGTSAQKAELIALTKALELSKGKKANIYTDSRYAFATAHTHGSIYERRGLLTSEGKEIKNKAEIIALLKALFLPQEVAIIHCPGHQKGQDPVAVGNRQADRVARQAAMAEVLTLATEPDNTSHITAGKRTADGSEFEKRTADGSEFESPKKKAKVE

SEQ ID NO: 7322 - protein, 2087 aa, synthetic construct
MPAAKRVKLDGGDKKYSIGLDIGTNSVGWAVITDEYKVPSKKFKVLGNTDRHSIKKNLIGALLFDSGETAEATRLKRTARRRYTRRKNRICYLQEIFSNEMAKVDDSFFHRLEESFLVEEDKKHERHPIFGNIVDEVAYHEKYPTIYHLRKKLVDSTDKADLRLIYLALAHMIKFRGHFLIEGDLNPDNSDVDKLFIQLVQTYNQLFEENPINASGVDAKAILSARLSKSRRLENLIAQLPGEKKNGLFGNLIALSLGLTPNFKSNFDLAEDAKLQLSKDTYDDDLDNLLAQIGDQYADLFLAAKNLSDAILLSDILRVNTEITKAPLSASMIKRYDEHHQDLTLLKALVRQQLPEKYKEIFFDQSKNGYAGYIDGGASQEEFYKFIKPILEKMDGTEELLVKLNREDLLRKQRTFDNGSIPHQIHLGELHAILRRQEDFYPFLKDNREKIEKILTFRIPYYVGPLARGNSRFAWMTRKSEETITPWNFEEVVDKGASAQSFIERMTNFDKNLPNEKVLPKHSLLYEYFTVYNELTKVKYVTEGMRKPAFLSGEQKKAIVDLLFKTNRKVTVKQLKEDYFKKIECFDSVEISGVEDRFNASLGTYHDLLKIIKDKDFLDNEENEDILEDIVLTLTLFEDREMIEERLKTYAHLFDDKVMKQLKRRRYTGWGRLSRKLINGIRDKQSGKTILDFLKSDGFANRNFMQLIHDDSLTFKEDIQKAQVSGQGDSLHEHIANLAGSPAIKKGILQTVKVVDELVKVMGRHKPENIVIEMARENQTTQKGQKNSRERMKRIEEGIKELGSQILKEHPVENTQLQNEKLYLYYLQNGRDMYVDQELDINRLSDYDVDHIVPQSFLKDDSIDNKVLTRSDKARGKSDNVPSEEVVKKMKNYWRQLLNAKLITQRKFDNLTKAERGGLSELDKAGFIKRQLVETRQITKHVAQILDSRMNTKYDENDKLIREVKVITLKSKLVSDFRKDFQFYKVREINNYHHAHDAYLNAVVGTALIKKYPKLESEFVYGDYKVYDVRKMIAKSEQEIGKATAKYFFYSNIMNFFKTEITLANGEIRKRPLIETNGETGEIVWDKGRDFATVRKVLSMPQVNIVKKTEVQTGGFSKESILPKRNSDKLIARKKDWDPKKYGGFDSPTVAYSVLVVAKVEKGKSKKLKSVKELLGITIMERSSFEKNPIDFLEAKGYKEVKKDLIIKLPKYSLFELENGRKRMLASAGELQKGNELALPSKYVNFLYLASHYEKLKGSPEDNEQKQLFVEQHKHYLDEIIEQISEFSKRVILADANLDKVLSAYNKHRDKPIREQAENIIHLFTLTNLGAPAAFKYFDTTIDRKRYTSTKEVLDATLIHQSITGLYETRIDLSQLGGDGGEAAAKGGGGSSGGVPWILKKPLELTIKLDLEEQQGTLLNNSILSKKGKEELKQLFEKYSALWQSWENQVGHRRIRPHKIATGTVKPTPQKQYHINPKAKPDIQIVINDLLKQGVLIQKESTMNTPVYPVPKPNGRWRMVLDYRAVNKVTPLIAVQNQHSYGILGSLFKGRYKTTIDLSNGFWAHPIVPEDYWITAFTWQGKQYCWTVLPQGFLNSPGLFTGDVVDLLQGIPNVEVYVDDVYISHDSEKEHLEYLDILFNRLKEAGYIISLKKSNIANSIVDFLGFQITNEGRGLTDTFKEKLENITAPTTLKQLQSILGLLNFARNFIPDFTELIAPLYALIPKSTKNYVPWQIEHSTTLETLITKLNGAEYLQGRKGDKTLIMKVNASYTTGYIRYYNEGEKKPISYVSIVFSKTELKFTELEKLLTTVHKGLLKALDLSMGQNIHVYSPIVSMQNIQKTPQTAKKALASRWLSWLSYLEDPRIRFFYDPQMPALKDLPAVDTGKDNKKHPSNFQHIFYTDGSAITSPTKEGHLNAGMGIVYFINKDGNLQKQQEWSISLGNHTAQFAEIAAFEFALKKCLPLGGNILVVTDSNYVAKAYNEELDVWASNGFVNNRKKPLKHISKWKSVADLKRLRPDVVVTHEPGHQKLDSSPHAYGNNLADQLATQASFKVHAGKRTADGSEFEKRTADGSEFESPKKKAKVE

SEQ ID NO: 7323 - protein, 2095 aa, synthetic construct
MPAAKRVKLDGGDKKYSIGLDIGTNSVGWAVITDEYKVPSKKFKVLGNTDRHSIKKNLIGALLFDSGETAEATRLKRTARRRYTRRKNRICYLQEIFSNEMAKVDDSFFHRLEESFLVEEDKKHERHPIFGNIVDEVAYHEKYPTIYHLRKKLVDSTDKADLRLIYLALAHMIKFRGHFLIEGDLNPDNSDVDKLFIQLVQTYNQLFEENPINASGVDAKAILSARLSKSRRLENLIAQLPGEKKNGLFGNLIALSLGLTPNFKSNFDLAEDAKLQLSKDTYDDDLDNLLAQIGDQYADLFLAAKNLSDAILLSDILRVNTEITKAPLSASMIKRYDEHHQDLTLLKALVRQQLPEKYKEIFFDQSKNGYAGYIDGGASQEEFYKFIKPILEKMDGTEELLVKLNREDLLRKQRTFDNGSIPHQIHLGELHAILRRQEDFYPFLKDNREKIEKILTFRIPYYVGPLARGNSRFAWMTRKSEETITPWNFEEVVDKGASAQSFIERMTNFDKNLPNEKVLPKHSLLYEYFTVYNELTKVKYVTEGMRKPAFLSGEQKKAIVDLLFKTNRKVTVKQLKEDYFKKIECFDSVEISGVEDRFNASLGTYHDLLKIIKDKDFLDNEENEDILEDIVLTLTLFEDREMIEERLKTYAHLFDDKVMKQLKRRRYTGWGRLSRKLINGIRDKQSGKTILDFLKSDGFANRNFMQLIHDDSLTFKEDIQKAQVSGQGDSLHEHIANLAGSPAIKKGILQTVKVVDELVKVMGRHKPENIVIEMARENQTTQKGQKNSRERMKRIEEGIKELGSQILKEHPVENTQLQNEKLYLYYLQNGRDMYVDQELDINRLSDYDVDHIVPQSFLKDDSIDNKVLTRSDKARGKSDNVPSEEVVKKMKNYWRQLLNAKLITQRKFDNLTKAERGGLSELDKAGFIKRQLVETRQITKHVAQILDSRMNTKYDENDKLIREVKVITLKSKLVSDFRKDFQFYKVREINNYHHAHDAYLNAVVGTALIKKYPKLESEFVYGDYKVYDVRKMIAKSEQEIGKATAKYFFYSNIMNFFKTEITLANGEIRKRPLIETNGETGEIVWDKGRDFATVRKVLSMPQVNIVKKTEVQTGGFSKESILPKRNSDKLIARKKDWDPKKYGGFDSPTVAYSVLVVAKVEKGKSKKLKSVKELLGITIMERSSFEKNPIDFLEAKGYKEVKKDLIIKLPKYSLFELENGRKRMLASAGELQKGNELALPSKYVNFLYLASHYEKLKGSPEDNEQKQLFVEQHKHYLDEIIEQISEFSKRVILADANLDKVLSAYNKHRDKPIREQAENIIHLFTLTNLGAPAAFKYFDTTIDRKRYTSTKEVLDATLIHQSITGLYETRIDLSQLGGDGGEAAAKGGGGSSGGTLQLEEEYRLFEPESTQKQEMDIWLKNFPQAWAETGGMGTAHCQAPVLIQLKATATPISIRQYPMPHEAYQGIKPHIRRMLDQGILKPCQSPWNTPLLPVKKPGTEDYRPVQDLREVNKRVEDIHPTVPNPYNLLSTLPPSHPWYTVLDLKDAFFCLRLHSESQLLFAFEWRDPEIGLSGQLTWTRLPQGFKNSPTLFNEALHSDLADFRVRYPALVLLQYVDDLLLAAATRTECLEGTKALLETLGNKGYRASAKKAQICLQEVTYLGYSLKDGQRWLTKARKEAILSIPVPKNSRQVREFLGTAGYCRLWIPGFAELAAPLYPLTRPGTLFQWGTEQQLAFEDIKKALLSSPALGLPDITKPFELFIDENSGFAKGVLVQKLGPWKRPVAYLSKKLDTVASGWPPCLRMVAAIAILVKDAGKLTLGQPLTILTSHPVEALVRQPPNKWLSNARMTHYQAMLLDAERVHFGPTVSLNPATLLPLPSGGNHHDCLQILAETHGTRPDLTDQPLPDADLTWYTDGSSFIRNGEREAGAAVTTESEVIWAAPLPPGTSAQRAELIALTQALKMAEGKKLTVYTDSRYAFATTHVHGEIYRRRGWLTSEGKEIKNKNEILALLEALFLPKRLSIIHCPGHQKGDSPQAKGNRLADDTAKKAATETHSSLTVLPAGKRTADGSEFEKRTADGSEFESPKKKAKVE

SEQ ID NO: 7324 - protein, 2095 aa, synthetic construct
MPAAKRVKLDGGDKKYSIGLDIGTNSVGWAVITDEYKVPSKKFKVLGNTDRHSIKKNLIGALLFDSGETAEATRLKRTARRRYTRRKNRICYLQEIFSNEMAKVDDSFFHRLEESFLVEEDKKHERHPIFGNIVDEVAYHEKYPTIYHLRKKLVDSTDKADLRLIYLALAHMIKFRGHFLIEGDLNPDNSDVDKLFIQLVQTYNQLFEENPINASGVDAKAILSARLSKSRRLENLIAQLPGEKKNGLFGNLIALSLGLTPNFKSNFDLAEDAKLQLSKDTYDDDLDNLLAQIGDQYADLFLAAKNLSDAILLSDILRVNTEITKAPLSASMIKRYDEHHQDLTLLKALVRQQLPEKYKEIFFDQSKNGYAGYIDGGASQEEFYKFIKPILEKMDGTEELLVKLNREDLLRKQRTFDNGSIPHQIHLGELHAILRRQEDFYPFLKDNREKIEKILTFRIPYYVGPLARGNSRFAWMTRKSEETITPWNFEEVVDKGASAQSFIERMTNFDKNLPNEKVLPKHSLLYEYFTVYNELTKVKYVTEGMRKPAFLSGEQKKAIVDLLFKTNRKVTVKQLKEDYFKKIECFDSVEISGVEDRFNASLGTYHDLLKIIKDKDFLDNEENEDILEDIVLTLTLFEDREMIEERLKTYAHLFDDKVMKQLKRRRYTGWGRLSRKLINGIRDKQSGKTILDFLKSDGFANRNFMQLIHDDSLTFKEDIQKAQVSGQGDSLHEHIANLAGSPAIKKGILQTVKVVDELVKVMGRHKPENIVIEMARENQTTQKGQKNSRERMKRIEEGIKELGSQILKEHPVENTQLQNEKLYLYYLQNGRDMYVDQELDINRLSDYDVDHIVPQSFLKDDSIDNKVLTRSDKARGKSDNVPSEEVVKKMKNYWRQLLNAKLITQRKFDNLTKAERGGLSELDKAGFIKRQLVETRQITKHVAQILDSRMNTKYDENDKLIREVKVITLKSKLVSDFRKDFQFYKVREINNYHHAHDAYLNAVVGTALIKKYPKLESEFVYGDYKVYDVRKMIAKSEQEIGKATAKYFFYSNIMNFFKTEITLANGEIRKRPLIETNGETGEIVWDKGRDFATVRKVLSMPQVNIVKKTEVQTGGFSKESILPKRNSDKLIARKKDWDPKKYGGFDSPTVAYSVLVVAKVEKGKSKKLKSVKELLGITIMERSSFEKNPIDFLEAKGYKEVKKDLIIKLPKYSLFELENGRKRMLASAGELQKGNELALPSKYVNFLYLASHYEKLKGSPEDNEQKQLFVEQHKHYLDEIIEQISEFSKRVILADANLDKVLSAYNKHRDKPIREQAENIIHLFTLTNLGAPAAFKYFDTTIDRKRYTSTKEVLDATLIHQSITGLYETRIDLSQLGGDGGEAAAKGGGGSSGGTLQLEEEYRLFEPESTQKQEMDIWLKNFPQAWAETGGMGTAHCQAPVLIQLKATATPISIRQYPMPHEAYQGIKPHIRRMLDQGILKPCQSPWNTPLLPVKKPGTEDYRPVQDLREVNKRVEDIHPTVPNPYNLLSTLPPSHPWYTVLDLKDAFFCLRLHSESQLLFAFEWRDPEIGLSGQLTWTRLPQGFKNSPTLFNEALHSDLADFRVRYPALVLLQYVDDLLLAAATRTECLEGTKALLETLGNKGYRASAKKAQICLQEVTYLGYSLKDGQRWLTKARKEAILSIPVPKNSRQVREFLGKAGYCRLFIPGFAELAAPLYPLTRPGTLFQWGTEQQLAFEDIKKALLSSPALGLPDITKPFELFIDENSGFAKGVLVQKLGPWKRPVAYLSKKLDTVASGWPPCLRMVAAIAILVKDAGKLTLGQPLTILTSHPVEALVRQPPNKWLSNARMTHYQAMLLDAERVHFGPTVSLNPATLLPLPSGGNHHDCLQILAETHGTRPDLTDQPLPDADLTWYTDGSSFIRNGEREAGAAVTTESEVIWAAPLPPGTSAQRAELIALTQALKMAEGKKLTVYTDSRYAFATTHVHGEIYRRRGWLTSEGKEIKNKNEILALLEALFLPKRLSIIHCPGHQKGDSPQAKGNRLADDTAKKAATETHSSLTVLPAGKRTADGSEFEKRTADGSEFESPKKKAKVE

SEQ ID NO: 7325 - protein, 2176 aa, synthetic construct
MPAAKRVKLDGGDKKYSIGLDIGTNSVGWAVITDEYKVPSKKFKVLGNTDRHSIKKNLIGALLFDSGETAEATRLKRTARRRYTRRKNRICYLQEIFSNEMAKVDDSFFHRLEESFLVEEDKKHERHPIFGNIVDEVAYHEKYPTIYHLRKKLVDSTDKADLRLIYLALAHMIKFRGHFLIEGDLNPDNSDVDKLFIQLVQTYNQLFEENPINASGVDAKAILSARLSKSRRLENLIAQLPGEKKNGLFGNLIALSLGLTPNFKSNFDLAEDAKLQLSKDTYDDDLDNLLAQIGDQYADLFLAAKNLSDAILLSDILRVNTEITKAPLSASMIKRYDEHHQDLTLLKALVRQQLPEKYKEIFFDQSKNGYAGYIDGGASQEEFYKFIKPILEKMDGTEELLVKLNREDLLRKQRTFDNGSIPHQIHLGELHAILRRQEDFYPFLKDNREKIEKILTFRIPYYVGPLARGNSRFAWMTRKSEETITPWNFEEVVDKGASAQSFIERMTNFDKNLPNEKVLPKHSLLYEYFTVYNELTKVKYVTEGMRKPAFLSGEQKKAIVDLLFKTNRKVTVKQLKEDYFKKIECFDSVEISGVEDRFNASLGTYHDLLKIIKDKDFLDNEENEDILEDIVLTLTLFEDREMIEERLKTYAHLFDDKVMKQLKRRRYTGWGRLSRKLINGIRDKQSGKTILDFLKSDGFANRNFMQLIHDDSLTFKEDIQKAQVSGQGDSLHEHIANLAGSPAIKKGILQTVKVVDELVKVMGRHKPENIVIEMARENQTTQKGQKNSRERMKRIEEGIKELGSQILKEHPVENTQLQNEKLYLYYLQNGRDMYVDQELDINRLSDYDVDHIVPQSFLKDDSIDNKVLTRSDKARGKSDNVPSEEVVKKMKNYWRQLLNAKLITQRKFDNLTKAERGGLSELDKAGFIKRQLVETRQITKHVAQILDSRMNTKYDENDKLIREVKVITLKSKLVSDFRKDFQFYKVREINNYHHAHDAYLNAVVGTALIKKYPKLESEFVYGDYKVYDVRKMIAKSEQEIGKATAKYFFYSNIMNFFKTEITLANGEIRKRPLIETNGETGEIVWDKGRDFATVRKVLSMPQVNIVKKTEVQTGGFSKESILPKRNSDKLIARKKDWDPKKYGGFDSPTVAYSVLVVAKVEKGKSKKLKSVKELLGITIMERSSFEKNPIDFLEAKGYKEVKKDLIIKLPKYSLFELENGRKRMLASAGELQKGNELALPSKYVNFLYLASHYEKLKGSPEDNEQKQLFVEQHKHYLDEIIEQISEFSKRVILADANLDKVLSAYNKHRDKPIREQAENIIHLFTLTNLGAPAAFKYFDTTIDRKRYTSTKEVLDATLIHQSITGLYETRIDLSQLGGDGGEAAAKGGGGSSGGMNPLQLLQPLPAEIKGTKLLAHWNSGATITCIPESFLEDEQPIKKTLIKTIHGEKQQNVYYVTFKVKGRKVEAEVIASPYEYILLSPTDVPWLTQQPLQLTILVPLQEYQEKILSKTALPEDQKQQLKTLFVKYDNLWQHWENQVGHRKIRPHNIATGDYPPRPQKQYPINPKAKPSIQIVIDDLLKQGVLTPQNSTMNTPVYPVPKPDGRWRMVLDYREVNKTIPLTAAQNQHSAGILATIVRQKYKTTLDLANGFWAHPITPESYWLTAFTWQGKQYCWTRLPQGFLNSPALFTADVVDLLKEIPNVQVYVDDIYLSHDDPKEHVQQLEKVFQILLQAGYVVSLKKSEIGQKTVEFLGFNITKEGRGLTDTFKTKLLNITPPKDLKQLQSILGLLNFARNFIPNFAELVQPLYNLIASAKGKYIEWSEENTKQLNMVIEALNTASNLEERLPEQRLVIKVNTSPSAGYVRYYNETGKKPIMYLNYVFSKAELKFSMLEKLLTTMHKALIKAMDLAMGQEILVYSPIVSMTKIQKTPLPERKALPIRWITWMTYLEDPRIQFHYDKTLPELKHIPDVYTSSQSPVKHPSQYEGVFYTDGSAIKSPDPTKSNNAGMGIVHATYKPEYQVLNQWSIPLGNHTAQMAEIAAVEFACKKALKIPGPVLVITDSFYVAESANKELPYWKSNGFVNNKKKPLKHISKWKSIAECLSMKPDITIQHEKGISLQIPVFILKGNALADKLATQGSYVVNAGKRTADGSEFEKRTADGSEFESPKKKAKVE

SEQ ID NO: 7326 - protein, 2094 aa, synthetic construct
MPAAKRVKLDGGDKKYSIGLDIGTNSVGWAVITDEYKVPSKKFKVLGNTDRHSIKKNLIGALLFDSGETAEATRLKRTARRRYTRRKNRICYLQEIFSNEMAKVDDSFFHRLEESFLVEEDKKHERHPIFGNIVDEVAYHEKYPTIYHLRKKLVDSTDKADLRLIYLALAHMIKFRGHFLIEGDLNPDNSDVDKLFIQLVQTYNQLFEENPINASGVDAKAILSARLSKSRRLENLIAQLPGEKKNGLFGNLIALSLGLTPNFKSNFDLAEDAKLQLSKDTYDDDLDNLLAQIGDQYADLFLAAKNLSDAILLSDILRVNTEITKAPLSASMIKRYDEHHQDLTLLKALVRQQLPEKYKEIFFDQSKNGYAGYIDGGASQEEFYKFIKPILEKMDGTEELLVKLNREDLLRKQRTFDNGSIPHQIHLGELHAILRRQEDFYPFLKDNREKIEKILTFRIPYYVGPLARGNSRFAWMTRKSEETITPWNFEEVVDKGASAQSFIERMTNFDKNLPNEKVLPKHSLLYEYFTVYNELTKVKYVTEGMRKPAFLSGEQKKAIVDLLFKTNRKVTVKQLKEDYFKKIECFDSVEISGVEDRFNASLGTYHDLLKIIKDKDFLDNEENEDILEDIVLTLTLFEDREMIEERLKTYAHLFDDKVMKQLKRRRYTGWGRLSRKLINGIRDKQSGKTILDFLKSDGFANRNFMQLIHDDSLTFKEDIQKAQVSGQGDSLHEHIANLAGSPAIKKGILQTVKVVDELVKVMGRHKPENIVIEMARENQTTQKGQKNSRERMKRIEEGIKELGSQILKEHPVENTQLQNEKLYLYYLQNGRDMYVDQELDINRLSDYDVDHIVPQSFLKDDSIDNKVLTRSDKARGKSDNVPSEEVVKKMKNYWRQLLNAKLITQRKFDNLTKAERGGLSELDKAGFIKRQLVETRQITKHVAQILDSRMNTKYDENDKLIREVKVITLKSKLVSDFRKDFQFYKVREINNYHHAHDAYLNAVVGTALIKKYPKLESEFVYGDYKVYDVRKMIAKSEQEIGKATAKYFFYSNIMNFFKTEITLANGEIRKRPLIETNGETGEIVWDKGRDFATVRKVLSMPQVNIVKKTEVQTGGFSKESILPKRNSDKLIARKKDWDPKKYGGFDSPTVAYSVLVVAKVEKGKSKKLKSVKELLGITIMERSSFEKNPIDFLEAKGYKEVKKDLIIKLPKYSLFELENGRKRMLASAGELQKGNELALPSKYVNFLYLASHYEKLKGSPEDNEQKQLFVEQHKHYLDEIIEQISEFSKRVILADANLDKVLSAYNKHRDKPIREQAENIIHLFTLTNLGAPAAFKYFDTTIDRKRYTSTKEVLDATLIHQSITGLYETRIDLSQLGGDGGEAAAKGGGGSSGGVLNLEEEYRLHEKPVPSSIDPSWLQLFPTVWAERAGMGLANQVPPVVVELRSGASPVAVRQYPMSKEAREGIRPHIQKFLDLGVLVPCRSPWNTPLLPVKKPGTNDYRPVQDLREINKRVQDIHPTVPNPYNLLSSLPPSYTWYSVLDLKDAFFCLRLHPNSQPLFAFEWKDPEKGNTGQLTWTRLPQGFKNSPTLFNEALHRDLAPFRALNPQVVLLQYVDDLLVAAPTYEDCKKGTQKLLQELSKLGYRVSAKKAQLCQREVTYLGYLLKEGKRWLTPARKATVMKIPVPTTPRQVREFLGTAGFCRLWIPGFASLAAPLYPLTKPSIPFIWTEEHQQAFDHIKKALLSAPALALPDLTKPFTLYIDERAGVARGVLTQTLGPWRRPVAYLSKKLDPVASGWPTCLKAVAAVALLLKDADKLTLGQNVTVIASHSLESIVRQPPDRWMTNARMTHYQSLLLNERVSFAPPAVLNPATLLPVESEATPVHRCSEILAEETGTRRDLEDQPLPGVPTWYTDGSSFITEGKRRAGAPIVDGKRTVWASSLPEGTSAQKAELVALTQALRLAEGKNINIYTDSRYAFATAHIHGAIYKQRGWLTSAGKDIKNKEEILALLEAIHLPRRVAIIHCPGHQRGSNPVATGNRRADEAAKQAALSTRVLAGTTKPAGKRTADGSEFEKRTADGSEFESPKKKAKVE

SEQ ID NO: 7327 - protein, 2218 aa, synthetic construct
MPAAKRVKLDGGDKKYSIGLDIGTNSVGWAVITDEYKVPSKKFKVLGNTDRHSIKKNLIGALLFDSGETAEATRLKRTARRRYTRRKNRICYLQEIFSNEMAKVDDSFFHRLEESFLVEEDKKHERHPIFGNIVDEVAYHEKYPTIYHLRKKLVDSTDKADLRLIYLALAHMIKFRGHFLIEGDLNPDNSDVDKLFIQLVQTYNQLFEENPINASGVDAKAILSARLSKSRRLENLIAQLPGEKKNGLFGNLIALSLGLTPNFKSNFDLAEDAKLQLSKDTYDDDLDNLLAQIGDQYADLFLAAKNLSDAILLSDILRVNTEITKAPLSASMIKRYDEHHQDLTLLKALVRQQLPEKYKEIFFDQSKNGYAGYIDGGASQEEFYKFIKPILEKMDGTEELLVKLNREDLLRKQRTFDNGSIPHQIHLGELHAILRRQEDFYPFLKDNREKIEKILTFRIPYYVGPLARGNSRFAWMTRKSEETITPWNFEEVVDKGASAQSFIERMTNFDKNLPNEKVLPKHSLLYEYFTVYNELTKVKYVTEGMRKPAFLSGEQKKAIVDLLFKTNRKVTVKQLKEDYFKKIECFDSVEISGVEDRFNASLGTYHDLLKIIKDKDFLDNEENEDILEDIVLTLTLFEDREMIEERLKTYAHLFDDKVMKQLKRRRYTGWGRLSRKLINGIRDKQSGKTILDFLKSDGFANRNFMQLIHDDSLTFKEDIQKAQVSGQGDSLHEHIANLAGSPAIKKGILQTVKVVDELVKVMGRHKPENIVIEMARENQTTQKGQKNSRERMKRIEEGIKELGSQILKEHPVENTQLQNEKLYLYYLQNGRDMYVDQELDINRLSDYDVDHIVPQSFLKDDSIDNKVLTRSDKARGKSDNVPSEEVVKKMKNYWRQLLNAKLITQRKFDNLTKAERGGLSELDKAGFIKRQLVETRQITKHVAQILDSRMNTKYDENDKLIREVKVITLKSKLVSDFRKDFQFYKVREINNYHHAHDAYLNAVVGTALIKKYPKLESEFVYGDYKVYDVRKMIAKSEQEIGKATAKYFFYSNIMNFFKTEITLANGEIRKRPLIETNGETGEIVWDKGRDFATVRKVLSMPQVNIVKKTEVQTGGFSKESILPKRNSDKLIARKKDWDPKKYGGFDSPTVAYSVLVVAKVEKGKSKKLKSVKELLGITIMERSSFEKNPIDFLEAKGYKEVKKDLIIKLPKYSLFELENGRKRMLASAGELQKGNELALPSKYVNFLYLASHYEKLKGSPEDNEQKQLFVEQHKHYLDEIIEQISEFSKRVILADANLDKVLSAYNKHRDKPIREQAENIIHLFTLTNLGAPAAFKYFDTTIDRKRYTSTKEVLDATLIHQSITGLYETRIDLSQLGGDGGEAAAKGGGGSSGGTLGDQGSRGSDPLPEPRVTLTVEGIPTEFLVNTGAEHSVLTKPMGKMGSKRTVVAGATGSKVYPWTTKRLLKIGQKQVTHSFLVIPECPAPLLGRDLLTKLKAQIQFSTEGPQVTWEDRPAMCLVLNLEEEYRLHEKPVPPSIDPSWLQLFPMVWAEKAGMGLANQVPPVVVELKSDASPVAVRQYPMSKEAREGIRPHIQRFLDLGILVPCQSPWNTPLLPVKKPGTNDYRPVQDLREVNKRVQDIHPTVPNPYNLLSSLPPSHTWYSVLDLKDAFFCLKLHPNSQPLFAFEWRDPEKGNTGQLTWTRLPQGFKNSPTLFNEALHRDLASFRALNPQVVMLQYVDDLLVAAPTYRDCKEGTRRLLQELSKLGYRVSAKKAQLCREEVTYLGYLLKGGKRWLTPARKATVMKIPTPTTPRQVREFLGTAGFCRLWIPGFASLAAPLYPLTRPKVPFTWTEAHQEAFGRIKEALLSAPALALPDLTKPFALYVDEKEGVARGVLTQTLGPWRRPVAYLSKKLDPVASGWPTCLKAIAAVALLLKDADKLTLGQNVLVIAPHNLESIVRQPPDRWMTNARMTHYQSLLLNERVSFAPPAILNPATLLPVESDDTPIHICSEILAEETGTRPDLRDQPLPGVPAWYTDGSSFIMDGRRQAGAAIVDNKRTVWASNLPEGTSAQKAELIALTQALRLAEGKSINIYTDSRYAFATAHVHGAIYKQRGWLTSAGKDIKNKEEILALLEAIHLPKRVAIIHCPGHQRGTDPVATGNRKADEAAKQAAQSTRILTETTKNAGKRTADGSEFEKRTADGSEFESPKKKAKVE

SEQ ID NO: 7328 - protein, 2096 aa, synthetic construct
MPAAKRVKLDGGDKKYSIGLDIGTNSVGWAVITDEYKVPSKKFKVLGNTDRHSIKKNLIGALLFDSGETAEATRLKRTARRRYTRRKNRICYLQEIFSNEMAKVDDSFFHRLEESFLVEEDKKHERHPIFGNIVDEVAYHEKYPTIYHLRKKLVDSTDKADLRLIYLALAHMIKFRGHFLIEGDLNPDNSDVDKLFIQLVQTYNQLFEENPINASGVDAKAILSARLSKSRRLENLIAQLPGEKKNGLFGNLIALSLGLTPNFKSNFDLAEDAKLQLSKDTYDDDLDNLLAQIGDQYADLFLAAKNLSDAILLSDILRVNTEITKAPLSASMIKRYDEHHQDLTLLKALVRQQLPEKYKEIFFDQSKNGYAGYIDGGASQEEFYKFIKPILEKMDGTEELLVKLNREDLLRKQRTFDNGSIPHQIHLGELHAILRRQEDFYPFLKDNREKIEKILTFRIPYYVGPLARGNSRFAWMTRKSEETITPWNFEEVVDKGASAQSFIERMTNFDKNLPNEKVLPKHSLLYEYFTVYNELTKVKYVTEGMRKPAFLSGEQKKAIVDLLFKTNRKVTVKQLKEDYFKKIECFDSVEISGVEDRFNASLGTYHDLLKIIKDKDFLDNEENEDILEDIVLTLTLFEDREMIEERLKTYAHLFDDKVMKQLKRRRYTGWGRLSRKLINGIRDKQSGKTILDFLKSDGFANRNFMQLIHDDSLTFKEDIQKAQVSGQGDSLHEHIANLAGSPAIKKGILQTVKVVDELVKVMGRHKPENIVIEMARENQTTQKGQKNSRERMKRIEEGIKELGSQILKEHPVENTQLQNEKLYLYYLQNGRDMYVDQELDINRLSDYDVDHIVPQSFLKDDSIDNKVLTRSDKARGKSDNVPSEEVVKKMKNYWRQLLNAKLITQRKFDNLTKAERGGLSELDKAGFIKRQLVETRQITKHVAQILDSRMNTKYDENDKLIREVKVITLKSKLVSDFRKDFQFYKVREINNYHHAHDAYLNAVVGTALIKKYPKLESEFVYGDYKVYDVRKMIAKSEQEIGKATAKYFFYSNIMNFFKTEITLANGEIRKRPLIETNGETGEIVWDKGRDFATVRKVLSMPQVNIVKKTEVQTGGFSKESILPKRNSDKLIARKKDWDPKKYGGFDSPTVAYSVLVVAKVEKGKSKKLKSVKELLGITIMERSSFEKNPIDFLEAKGYKEVKKDLIIKLPKYSLFELENGRKRMLASAGELQKGNELALPSKYVNFLYLASHYEKLKGSPEDNEQKQLFVEQHKHYLDEIIEQISEFSKRVILADANLDKVLSAYNKHRDKPIREQAENIIHLFTLTNLGAPAAFKYFDTTIDRKRYTSTKEVLDATLIHQSITGLYETRIDLSQLGGDGGEAAAKGGGGSSGGTLGIEDEYRLHETSTEPDVSLGSTWLSDFPQAWAETGGMGLAVRQAPLIIPLKATSTPVSIQQYPMSHEARLGIKPHIQRLLDQGILVPCQSPWNTPLLPVKKPGTNDYRPVQDLREVNKRVEDIHPTVPNPYNLLSGLPPSHQWYTVLDLKDAFFCLRLHPTSQPLFAFEWRDPGMGISGQLTWTRLPQGFKNSPTLFNEALHRDLADFRIQHPDLILLQYVDDILLAATSELDCQQGTRALLQTLGDLGYRASAKKAQICQKQVKYLGYLLREGQRWLTEARKETVMGQPVPKTPRQLREFLGTAGFCRLWIPGFAEMAAPLYPLTKPGTLFSWGPDQQKAYQEIKQALLTAPALGLPDLTKPFELFVDEKQGYAKGVLTQKLGPWRRPVAYLSKKLDPVAAGWPPCLRMVAAIAVLTKDAGKLTMGQPLVILAPHAVEALVKQPPDRWLSNARMTHYQAMLLDTDRVQFGPVVALNPATLLPLPEEGAPHDCLEILAETHGTRPDLTDQPIPDADHTWYTDGSSFLQEGQRKAGAAVTTETEVIWAGALPAGTSAQRAELIALTQALKMAEGKRLNVYTDSRYAFATAHIHGEIYRRRGWLTSEGREIKNKSEILALLKALFLPKRLSIIHCLGHQKGDSAEARGNRLADQAAREAAIKTPPDTSTLLAGKRTADGSEFEKRTADGSEFESPKKKAKVE

SEQ ID NO: 7329 - protein, 2096 aa, synthetic construct
MPAAKRVKLDGGDKKYSIGLDIGTNSVGWAVITDEYKVPSKKFKVLGNTDRHSIKKNLIGALLFDSGETAEATRLKRTARRRYTRRKNRICYLQEIFSNEMAKVDDSFFHRLEESFLVEEDKKHERHPIFGNIVDEVAYHEKYPTIYHLRKKLVDSTDKADLRLIYLALAHMIKFRGHFLIEGDLNPDNSDVDKLFIQLVQTYNQLFEENPINASGVDAKAILSARLSKSRRLENLIAQLPGEKKNGLFGNLIALSLGLTPNFKSNFDLAEDAKLQLSKDTYDDDLDNLLAQIGDQYADLFLAAKNLSDAILLSDILRVNTEITKAPLSASMIKRYDEHHQDLTLLKALVRQQLPEKYKEIFFDQSKNGYAGYIDGGASQEEFYKFIKPILEKMDGTEELLVKLNREDLLRKQRTFDNGSIPHQIHLGELHAILRRQEDFYPFLKDNREKIEKILTFRIPYYVGPLARGNSRFAWMTRKSEETITPWNFEEVVDKGASAQSFIERMTNFDKNLPNEKVLPKHSLLYEYFTVYNELTKVKYVTEGMRKPAFLSGEQKKAIVDLLFKTNRKVTVKQLKEDYFKKIECFDSVEISGVEDRFNASLGTYHDLLKIIKDKDFLDNEENEDILEDIVLTLTLFEDREMIEERLKTYAHLFDDKVMKQLKRRRYTGWGRLSRKLINGIRDKQSGKTILDFLKSDGFANRNFMQLIHDDSLTFKEDIQKAQVSGQGDSLHEHIANLAGSPAIKKGILQTVKVVDELVKVMGRHKPENIVIEMARENQTTQKGQKNSRERMKRIEEGIKELGSQILKEHPVENTQLQNEKLYLYYLQNGRDMYVDQELDINRLSDYDVDHIVPQSFLKDDSIDNKVLTRSDKARGKSDNVPSEEVVKKMKNYWRQLLNAKLITQRKFDNLTKAERGGLSELDKAGFIKRQLVETRQITKHVAQILDSRMNTKYDENDKLIREVKVITLKSKLVSDFRKDFQFYKVREINNYHHAHDAYLNAVVGTALIKKYPKLESEFVYGDYKVYDVRKMIAKSEQEIGKATAKYFFYSNIMNFFKTEITLANGEIRKRPLIETNGETGEIVWDKGRDFATVRKVLSMPQVNIVKKTEVQTGGFSKESILPKRNSDKLIARKKDWDPKKYGGFDSPTVAYSVLVVAKVEKGKSKKLKSVKELLGITIMERSSFEKNPIDFLEAKGYKEVKKDLIIKLPKYSLFELENGRKRMLASAGELQKGNELALPSKYVNFLYLASHYEKLKGSPEDNEQKQLFVEQHKHYLDEIIEQISEFSKRVILADANLDKVLSAYNKHRDKPIREQAENIIHLFTLTNLGAPAAFKYFDTTIDRKRYTSTKEVLDATLIHQSITGLYETRIDLSQLGGDGGEAAAKGGGGSSGGTLNIEDEYRLHETSKGPDVPLGSTWLSDFPQAWAETGGMGLAVRQAPLIIPLKATSTPVSIKQYPMSQEARLGIKPHIQRLLDQGILVPCQSPWNTPLLPVKKPGTNDYRPVQDLREVNKRVEDIHPTVPNPYNLLSGLPPSHQWYTVLDLKDAFFCLRLHPTSQSLFAFEWRDPEMGISGQLTWTRLPQGFKNSPTLFNEALHRDLADFRIQHPDLILLQYVDDLLLAATSELDCQQGTRALLQTLGDLGYRASAKKAQICQKQVKYLGYLLKEGQRWLTEARKETVMGQPTPKTPRQLREFLGKAGFCRLFIPGFAEMAAPLYPLTKPGTLFEWGPDQQKAYQEIKQALLTAPALGLPDLTKPFELFVDEKQGYAKGVLTQKLGPWRRPVAYLSKKLDPVAAGWPPCLRMVAAIAVLTKDAGKLTMGQPLVILAPHAVEALVKQPPDRWLSNARMTHYQALLLDTDRVQFGPIVALNPATLLPLPEEGLQHDCLDILAEAHGTRPDLTDQPLPDADHTWYTDGSSFLQEGQRKAGAAVTTETEVVWAKALPAGTSAQRAELIALTQALKMAEGKKLNVYTDSRYAFATAHIHGEIYRRRGWLTSEGKEIKNKDEILALLKALFLPKRLSIIHCPGHQKGNRAEARGNRMADQAAREVATRETPETSTLLAGKRTADGSEFEKRTADGSEFESPKKKAKVE

SEQ ID NO: 7330 - protein, 2096 aa, synthetic construct
MPAAKRVKLDGGDKKYSIGLDIGTNSVGWAVITDEYKVPSKKFKVLGNTDRHSIKKNLIGALLFDSGETAEATRLKRTARRRYTRRKNRICYLQEIFSNEMAKVDDSFFHRLEESFLVEEDKKHERHPIFGNIVDEVAYHEKYPTIYHLRKKLVDSTDKADLRLIYLALAHMIKFRGHFLIEGDLNPDNSDVDKLFIQLVQTYNQLFEENPINASGVDAKAILSARLSKSRRLENLIAQLPGEKKNGLFGNLIALSLGLTPNFKSNFDLAEDAKLQLSKDTYDDDLDNLLAQIGDQYADLFLAAKNLSDAILLSDILRVNTEITKAPLSASMIKRYDEHHQDLTLLKALVRQQLPEKYKEIFFDQSKNGYAGYIDGGASQEEFYKFIKPILEKMDGTEELLVKLNREDLLRKQRTFDNGSIPHQIHLGELHAILRRQEDFYPFLKDNREKIEKILTFRIPYYVGPLARGNSRFAWMTRKSEETITPWNFEEVVDKGASAQSFIERMTNFDKNLPNEKVLPKHSLLYEYFTVYNELTKVKYVTEGMRKPAFLSGEQKKAIVDLLFKTNRKVTVKQLKEDYFKKIECFDSVEISGVEDRFNASLGTYHDLLKIIKDKDFLDNEENEDILEDIVLTLTLFEDREMIEERLKTYAHLFDDKVMKQLKRRRYTGWGRLSRKLINGIRDKQSGKTILDFLKSDGFANRNFMQLIHDDSLTFKEDIQKAQVSGQGDSLHEHIANLAGSPAIKKGILQTVKVVDELVKVMGRHKPENIVIEMARENQTTQKGQKNSRERMKRIEEGIKELGSQILKEHPVENTQLQNEKLYLYYLQNGRDMYVDQELDINRLSDYDVDHIVPQSFLKDDSIDNKVLTRSDKARGKSDNVPSEEVVKKMKNYWRQLLNAKLITQRKFDNLTKAERGGLSELDKAGFIKRQLVETRQITKHVAQILDSRMNTKYDENDKLIREVKVITLKSKLVSDFRKDFQFYKVREINNYHHAHDAYLNAVVGTALIKKYPKLESEFVYGDYKVYDVRKMIAKSEQEIGKATAKYFFYSNIMNFFKTEITLANGEIRKRPLIETNGETGEIVWDKGRDFATVRKVLSMPQVNIVKKTEVQTGGFSKESILPKRNSDKLIARKKDWDPKKYGGFDSPTVAYSVLVVAKVEKGKSKKLKSVKELLGITIMERSSFEKNPIDFLEAKGYKEVKKDLIIKLPKYSLFELENGRKRMLASAGELQKGNELALPSKYVNFLYLASHYEKLKGSPEDNEQKQLFVEQHKHYLDEIIEQISEFSKRVILADANLDKVLSAYNKHRDKPIREQAENIIHLFTLTNLGAPAAFKYFDTTIDRKRYTSTKEVLDATLIHQSITGLYETRIDLSQLGGDGGEAAAKGGGGSSGGTLNIEDEHRLHETSKEPDVSLGSTWLSDFPQAWAETGGMGLAVRQAPLIIPLKATSTPVSIKQYPMSQEARLGIKPHIQRLLDQGILVPCQSPWNTPLLPVKKPGTNDYRPVQDLREVNKRVEDIHPTVPNPYNLLSGLPPSHQWYTVLDLKDAFFCLRLHPTSQPLFAFEWRDPEMGISGQLTWTRLPQGFKNSPTLFDEALHRDLADFRIQHPDLILLQYVDDLLLAATSELDCQQGTRALLQTLGNLGYRASAKKAQICQKQVKYLGYLLKEGQRWLTEARKETVMGQPTPKTPRQLREFLGTAGFCRLWIPGFAEMAAPLYPLTKTGTLFNWGPDQQKAYQEIKQALLTAPALGLPDLTKPFELFVDEKQGYAKGVLTQKLGPWRRPVAYLSKKLDPVAAGWPPCLRMVAAIAVLTKDAGKLTMGQPLVILAPHAVEALVKQPPDRWLSNARMTHYQALLLDTDRVQFGPVVALNPATLLPLPEEGLQHNCLDILAEAHGTRPDLTDQPLPDADHTWYTDGSSLLQEGQRKAGAAVTTETEVIWAKALPAGTSAQRAELIALTQALKMAEGKKLNVYTDSRYAFATAHIHGEIYRRRGLLTSEGKEIKNKDEILALLKALFLPKRLSIIHCPGHQKGHSAEARGNRMADQAARKAAITETPDTSTLLAGKRTADGSEFEKRTADGSEFESPKKKAKVE

SEQ ID NO: 7331 - protein, 2096 aa, synthetic construct
MPAAKRVKLDGGDKKYSIGLDIGTNSVGWAVITDEYKVPSKKFKVLGNTDRHSIKKNLIGALLFDSGETAEATRLKRTARRRYTRRKNRICYLQEIFSNEMAKVDDSFFHRLEESFLVEEDKKHERHPIFGNIVDEVAYHEKYPTIYHLRKKLVDSTDKADLRLIYLALAHMIKFRGHFLIEGDLNPDNSDVDKLFIQLVQTYNQLFEENPINASGVDAKAILSARLSKSRRLENLIAQLPGEKKNGLFGNLIALSLGLTPNFKSNFDLAEDAKLQLSKDTYDDDLDNLLAQIGDQYADLFLAAKNLSDAILLSDILRVNTEITKAPLSASMIKRYDEHHQDLTLLKALVRQQLPEKYKEIFFDQSKNGYAGYIDGGASQEEFYKFIKPILEKMDGTEELLVKLNREDLLRKQRTFDNGSIPHQIHLGELHAILRRQEDFYPFLKDNREKIEKILTFRIPYYVGPLARGNSRFAWMTRKSEETITPWNFEEVVDKGASAQSFIERMTNFDKNLPNEKVLPKHSLLYEYFTVYNELTKVKYVTEGMRKPAFLSGEQKKAIVDLLFKTNRKVTVKQLKEDYFKKIECFDSVEISGVEDRFNASLGTYHDLLKIIKDKDFLDNEENEDILEDIVLTLTLFEDREMIEERLKTYAHLFDDKVMKQLKRRRYTGWGRLSRKLINGIRDKQSGKTILDFLKSDGFANRNFMQLIHDDSLTFKEDIQKAQVSGQGDSLHEHIANLAGSPAIKKGILQTVKVVDELVKVMGRHKPENIVIEMARENQTTQKGQKNSRERMKRIEEGIKELGSQILKEHPVENTQLQNEKLYLYYLQNGRDMYVDQELDINRLSDYDVDHIVPQSFLKDDSIDNKVLTRSDKARGKSDNVPSEEVVKKMKNYWRQLLNAKLITQRKFDNLTKAERGGLSELDKAGFIKRQLVETRQITKHVAQILDSRMNTKYDENDKLIREVKVITLKSKLVSDFRKDFQFYKVREINNYHHAHDAYLNAVVGTALIKKYPKLESEFVYGDYKVYDVRKMIAKSEQEIGKATAKYFFYSNIMNFFKTEITLANGEIRKRPLIETNGETGEIVWDKGRDFATVRKVLSMPQVNIVKKTEVQTGGFSKESILPKRNSDKLIARKKDWDPKKYGGFDSPTVAYSVLVVAKVEKGKSKKLKSVKELLGITIMERSSFEKNPIDFLEAKGYKEVKKDLIIKLPKYSLFELENGRKRMLASAGELQKGNELALPSKYVNFLYLASHYEKLKGSPEDNEQKQLFVEQHKHYLDEIIEQISEFSKRVILADANLDKVLSAYNKHRDKPIREQAENIIHLFTLTNLGAPAAFKYFDTTIDRKRYTSTKEVLDATLIHQSITGLYETRIDLSQLGGDGGEAAAKGGGGSSGGTLNIEDEYRLHEISTEPDVSPGSTWLSDFPQAWAETGGMGLAVRQAPLIIPLKATSTPVSIKQYPMSQEAKLGIKPHIQRLLDQGILVPCQSPWNTPLLPVKKPGTNDYRPVQGLREVNKRVEDIHPTVPNPYNLLSGLPTSHRWYTVLDLKDAFFCLRLHPTSQPLFASEWRDPGMGISGQLTWTRLPQGFKNSPTLFNEALHRGLADFRIQHPDLILLQYVDDLLLAATSELDCQQGTRALLKTLGNLGYRASAKKAQICQKQVKYLGYLLREGQRWLTEARKETVMGQPTPKTPRQLREFLGTAGFCRLWIPRFAEMAAPLYPLTKPGTLFNWGPDQQKAYHEIKQALLTAPALGLPDLTKPFELFVDEKQGYAKGVLTQKLGPWRRPVAYLSKKLDPVAAGWPPCLRMVAAIAVLTKDAGKLTMGQPLVILAPHAVEALVKQPPDRWLSNARMTHYQAMLLDTDRVQFGPVVALNPATLLPLPEEGAPHDCLEILAETHGTEPDLTDQPIPDADHTWYTDGSSFLQEGQRKAGAAVTTETEVIWARALPAGTSAQRAELIALTQALKMAEGKRLNVYTDSRYAFATAHIHGEIYKRRGWLTSEGREIKNKSEILALLKALFLPKRLSIIHCLGHQKGDSAEARGNRLADQAAREAAIKTPPDTSTLLAGKRTADGSEFEKRTADGSEFESPKKKAKVE

SEQ ID NO: 7332 - protein, 2087 aa, synthetic construct
MPAAKRVKLDGGDKKYSIGLDIGTNSVGWAVITDEYKVPSKKFKVLGNTDRHSIKKNLIGALLFDSGETAEATRLKRTARRRYTRRKNRICYLQEIFSNEMAKVDDSFFHRLEESFLVEEDKKHERHPIFGNIVDEVAYHEKYPTIYHLRKKLVDSTDKADLRLIYLALAHMIKFRGHFLIEGDLNPDNSDVDKLFIQLVQTYNQLFEENPINASGVDAKAILSARLSKSRRLENLIAQLPGEKKNGLFGNLIALSLGLTPNFKSNFDLAEDAKLQLSKDTYDDDLDNLLAQIGDQYADLFLAAKNLSDAILLSDILRVNTEITKAPLSASMIKRYDEHHQDLTLLKALVRQQLPEKYKEIFFDQSKNGYAGYIDGGASQEEFYKFIKPILEKMDGTEELLVKLNREDLLRKQRTFDNGSIPHQIHLGELHAILRRQEDFYPFLKDNREKIEKILTFRIPYYVGPLARGNSRFAWMTRKSEETITPWNFEEVVDKGASAQSFIERMTNFDKNLPNEKVLPKHSLLYEYFTVYNELTKVKYVTEGMRKPAFLSGEQKKAIVDLLFKTNRKVTVKQLKEDYFKKIECFDSVEISGVEDRFNASLGTYHDLLKIIKDKDFLDNEENEDILEDIVLTLTLFEDREMIEERLKTYAHLFDDKVMKQLKRRRYTGWGRLSRKLINGIRDKQSGKTILDFLKSDGFANRNFMQLIHDDSLTFKEDIQKAQVSGQGDSLHEHIANLAGSPAIKKGILQTVKVVDELVKVMGRHKPENIVIEMARENQTTQKGQKNSRERMKRIEEGIKELGSQILKEHPVENTQLQNEKLYLYYLQNGRDMYVDQELDINRLSDYDVDHIVPQSFLKDDSIDNKVLTRSDKARGKSDNVPSEEVVKKMKNYWRQLLNAKLITQRKFDNLTKAERGGLSELDKAGFIKRQLVETRQITKHVAQILDSRMNTKYDENDKLIREVKVITLKSKLVSDFRKDFQFYKVREINNYHHAHDAYLNAVVGTALIKKYPKLESEFVYGDYKVYDVRKMIAKSEQEIGKATAKYFFYSNIMNFFKTEITLANGEIRKRPLIETNGETGEIVWDKGRDFATVRKVLSMPQVNIVKKTEVQTGGFSKESILPKRNSDKLIARKKDWDPKKYGGFDSPTVAYSVLVVAKVEKGKSKKLKSVKELLGITIMERSSFEKNPIDFLEAKGYKEVKKDLIIKLPKYSLFELENGRKRMLASAGELQKGNELALPSKYVNFLYLASHYEKLKGSPEDNEQKQLFVEQHKHYLDEIIEQISEFSKRVILADANLDKVLSAYNKHRDKPIREQAENIIHLFTLTNLGAPAAFKYFDTTIDRKRYTSTKEVLDATLIHQSITGLYETRIDLSQLGGDGGEAAAKGGGGSSGGIPWLMKKPLQLTTLVPLQEYEERLLKQTMLTGSYKEKLQSLFLKYDALWQHWENQVGHRRIKPHHIATGTVNPRPQKQYPINPKAKASIQTVINDLLKQGVLIQQNSIMNTPVYPVPKPDGKWRMVLDYREVNKTIPLIAAQNQHSAGILSSIFRGKYKTTLDLSNGFWAHSITPESYWLTAFTWLGQQYCWTRLPQGFLNSPALFNADVVDLLKEVPNVQVYVDDIYISHDDPREHLEQLEKVFSLLLNAGYVVSLKKSEIAQHEVEFLGFNITKEGRGLTETFKQKLLNITPPRDLKQLQSILGLLNFARNFIPNFSELVKPLYNIIATAPGKYITWTTDNSQQLQNIISMLNSAENLEERNPEVRLIMKVNTSPSAGYIRFYNEFAKRPIMYLNYVYTKAEVKFTNTEKLLTTIHKGLIKALDLGMGQEILVYSPIVSMTKIQKTPLPERKALPIRWITWMSYLEDPRIQFHYDKTLPELQQVPTVTDDIIAKIKHPSEFSMVFYTDGSAIKHPNVNKSHNAGMGIAQVQFKPEFTVINTWSIPLGDHTAQLAEVAAVEFACKKALKIDGPVLIVTDSFYVAESVNKELPYWQSNGFFNNKKKPLKHVSKWKSIADCIQLKPDIIIIHEKGHQPTASTFHTEGNNLADKLATQGSYVVNAGKRTADGSEFEKRTADGSEFESPKKKAKVE

SEQ ID NO: 7333 - protein, 2176 aa, synthetic construct
MPAAKRVKLDGGDKKYSIGLDIGTNSVGWAVITDEYKVPSKKFKVLGNTDRHSIKKNLIGALLFDSGETAEATRLKRTARRRYTRRKNRICYLQEIFSNEMAKVDDSFFHRLEESFLVEEDKKHERHPIFGNIVDEVAYHEKYPTIYHLRKKLVDSTDKADLRLIYLALAHMIKFRGHFLIEGDLNPDNSDVDKLFIQLVQTYNQLFEENPINASGVDAKAILSARLSKSRRLENLIAQLPGEKKNGLFGNLIALSLGLTPNFKSNFDLAEDAKLQLSKDTYDDDLDNLLAQIGDQYADLFLAAKNLSDAILLSDILRVNTEITKAPLSASMIKRYDEHHQDLTLLKALVRQQLPEKYKEIFFDQSKNGYAGYIDGGASQEEFYKFIKPILEKMDGTEELLVKLNREDLLRKQRTFDNGSIPHQIHLGELHAILRRQEDFYPFLKDNREKIEKILTFRIPYYVGPLARGNSRFAWMTRKSEETITPWNFEEVVDKGASAQSFIERMTNFDKNLPNEKVLPKHSLLYEYFTVYNELTKVKYVTEGMRKPAFLSGEQKKAIVDLLFKTNRKVTVKQLKEDYFKKIECFDSVEISGVEDRFNASLGTYHDLLKIIKDKDFLDNEENEDILEDIVLTLTLFEDREMIEERLKTYAHLFDDKVMKQLKRRRYTGWGRLSRKLINGIRDKQSGKTILDFLKSDGFANRNFMQLIHDDSLTFKEDIQKAQVSGQGDSLHEHIANLAGSPAIKKGILQTVKVVDELVKVMGRHKPENIVIEMARENQTTQKGQKNSRERMKRIEEGIKELGSQILKEHPVENTQLQNEKLYLYYLQNGRDMYVDQELDINRLSDYDVDHIVPQSFLKDDSIDNKVLTRSDKARGKSDNVPSEEVVKKMKNYWRQLLNAKLITQRKFDNLTKAERGGLSELDKAGFIKRQLVETRQITKHVAQILDSRMNTKYDENDKLIREVKVITLKSKLVSDFRKDFQFYKVREINNYHHAHDAYLNAVVGTALIKKYPKLESEFVYGDYKVYDVRKMIAKSEQEIGKATAKYFFYSNIMNFFKTEITLANGEIRKRPLIETNGETGEIVWDKGRDFATVRKVLSMPQVNIVKKTEVQTGGFSKESILPKRNSDKLIARKKDWDPKKYGGFDSPTVAYSVLVVAKVEKGKSKKLKSVKELLGITIMERSSFEKNPIDFLEAKGYKEVKKDLIIKLPKYSLFELENGRKRMLASAGELQKGNELALPSKYVNFLYLASHYEKLKGSPEDNEQKQLFVEQHKHYLDEIIEQISEFSKRVILADANLDKVLSAYNKHRDKPIREQAENIIHLFTLTNLGAPAAFKYFDTTIDRKRYTSTKEVLDATLIHQSITGLYETRIDLSQLGGDGGEAAAKGGGGSSGGMDPLQLLQPLEAEIKGTKLKAHWNSGATITCVPQAFLEEEVPIKNIWIKTIHGEKEQPVYYLTFKIQGRKVEAEVISSPYDYILVSPSDIPWLMKKPLQLTTLVPLQEYEERLLKQTMLTGSYKEKLQSLFLKYDALWQHWENQVGHRRIKPHHIATGTVNPRPQKQYPINPKAKASIQTVINDLLKQGVLIQQNSIMNTPVYPVPKPDGKWRMVLDYREVNKTIPLIAAQNQHSAGILSSIFRGKYKTTLDLSNGFWAHSITPESYWLTAFTWLGQQYCWTRLPQGFLNSPALFNADVVDLLKEVPNVQVYVDDIYISHDDPREHLEQLEKVFSLLLNAGYVVSLKKSEIAQHEVEFLGFNITKEGRGLTETFKQKLLNITPPRDLKQLQSILGKLNFARNFIPNFSELVKPLYNIIATAPGKYITWTTDNSQQLQNIISMLNSAENLEERNPEVRLIMKVNTSPSAGYIRFYNEFAKRPIMYLNYVYTKAEVKFTNTEKLLTTIHKGLIKALDLGMGQEILVYSPIVSMTKIQKTPLPERKALPIRWITWMSYLEDPRIQFHYDKTLPELQQVPTVTDDIIAKIKHPSEFSMVFYTDGSAIKHPNVNKSHNAGMGIAQVQFKPEFTVINTWSIPLGDHTAQLAEVAAVEFACKKALKIDGPVLIVTDSFYVAESVNKELPYWQSNGFFNNKKKPLKHVSKWKSIADCIQLKPDIIIIHEKGHQPTASTFHTEGNNLADKLATQGSYVVNAGKRTADGSEFEKRTADGSEFESPKKKAKVE

SEQ ID NO: 7334 - protein, 2087 aa, synthetic construct
MPAAKRVKLDGGDKKYSIGLDIGTNSVGWAVITDEYKVPSKKFKVLGNTDRHSIKKNLIGALLFDSGETAEATRLKRTARRRYTRRKNRICYLQEIFSNEMAKVDDSFFHRLEESFLVEEDKKHERHPIFGNIVDEVAYHEKYPTIYHLRKKLVDSTDKADLRLIYLALAHMIKFRGHFLIEGDLNPDNSDVDKLFIQLVQTYNQLFEENPINASGVDAKAILSARLSKSRRLENLIAQLPGEKKNGLFGNLIALSLGLTPNFKSNFDLAEDAKLQLSKDTYDDDLDNLLAQIGDQYADLFLAAKNLSDAILLSDILRVNTEITKAPLSASMIKRYDEHHQDLTLLKALVRQQLPEKYKEIFFDQSKNGYAGYIDGGASQEEFYKFIKPILEKMDGTEELLVKLNREDLLRKQRTFDNGSIPHQIHLGELHAILRRQEDFYPFLKDNREKIEKILTFRIPYYVGPLARGNSRFAWMTRKSEETITPWNFEEVVDKGASAQSFIERMTNFDKNLPNEKVLPKHSLLYEYFTVYNELTKVKYVTEGMRKPAFLSGEQKKAIVDLLFKTNRKVTVKQLKEDYFKKIECFDSVEISGVEDRFNASLGTYHDLLKIIKDKDFLDNEENEDILEDIVLTLTLFEDREMIEERLKTYAHLFDDKVMKQLKRRRYTGWGRLSRKLINGIRDKQSGKTILDFLKSDGFANRNFMQLIHDDSLTFKEDIQKAQVSGQGDSLHEHIANLAGSPAIKKGILQTVKVVDELVKVMGRHKPENIVIEMARENQTTQKGQKNSRERMKRIEEGIKELGSQILKEHPVENTQLQNEKLYLYYLQNGRDMYVDQELDINRLSDYDVDHIVPQSFLKDDSIDNKVLTRSDKARGKSDNVPSEEVVKKMKNYWRQLLNAKLITQRKFDNLTKAERGGLSELDKAGFIKRQLVETRQITKHVAQILDSRMNTKYDENDKLIREVKVITLKSKLVSDFRKDFQFYKVREINNYHHAHDAYLNAVVGTALIKKYPKLESEFVYGDYKVYDVRKMIAKSEQEIGKATAKYFFYSNIMNFFKTEITLANGEIRKRPLIETNGETGEIVWDKGRDFATVRKVLSMPQVNIVKKTEVQTGGFSKESILPKRNSDKLIARKKDWDPKKYGGFDSPTVAYSVLVVAKVEKGKSKKLKSVKELLGITIMERSSFEKNPIDFLEAKGYKEVKKDLIIKLPKYSLFELENGRKRMLASAGELQKGNELALPSKYVNFLYLASHYEKLKGSPEDNEQKQLFVEQHKHYLDEIIEQISEFSKRVILADANLDKVLSAYNKHRDKPIREQAENIIHLFTLTNLGAPAAFKYFDTTIDRKRYTSTKEVLDATLIHQSITGLYETRIDLSQLGGDGGEAAAKGGGGSSGGVPWLTQQPLQLTILVPLQEYQDRILNKTALPEEQKQQLKALFTKYDNLWQHWENQVGHRKIRPHNIATGDYPPRPQKQYPINPKAKPSIQIVIDDLLKQGVLTPQNSTMNTPVYPVPKPDGRWRMVLDYREVNKTIPLTAAQNQHSAGILATIVRQKYKTTLDLANGFWAHPITPDSYWLTAFTWQGKQYCWTRLPQGFLNSPALFNADAVDLLKEVPNVQVYVDDIYLSHDNPHEHIQQLEKVFQILLQAGYVVSLKKSEIGQRTVEFLGFNITKEGRGLTDTFKTKLLNVTPPKDLKQLQSILGKLNFARNFIPNFAELVQTLYNLIASSPGKYIEWTEDNTKQLNKVIEALNTASNLEERLPDQRLVIKVNTSPSAGYVRYYNESGKKPIMYLNYVFSKAELKFSMLEKLLTTMHKALIKAMDLAMGQEILVYSPIVSMTKIQKTPLPERKALPIRWITWMTYLEDPRIQFHYDKTLPELKHIPDVYTSSIPPLKHPSQYEGVFCTDGSAIKSPDPTKSNNAGMGIVHAIYNPEYKILNQWSIPLGHHTAQMAEIAAVEFACKKALKVPGPVLVITDSFYVAESANKELPYWKSNGFVNNKKEPLKHISKWKSIAECLSIKPDITIQHEKGHQPINTSIHTEGNALADKLATQGSYVVNAGKRTADGSEFEKRTADGSEFESPKKKAKVE

SEQ ID NO: 7335 - protein, 2094 aa, synthetic construct; identical to SEQ ID NO: 4531

SEQ ID NO: 7336 - protein, 2098 aa, synthetic construct
MPAAKRVKLDGGDKKYSIGLDIGTNSVGWAVITDEYKVPSKKFKVLGNTDRHSIKKNLIGALLFDSGETAEATRLKRTARRRYTRRKNRICYLQEIFSNEMAKVDDSFFHRLEESFLVEEDKKHERHPIFGNIVDEVAYHEKYPTIYHLRKKLVDSTDKADLRLIYLALAHMIKFRGHFLIEGDLNPDNSDVDKLFIQLVQTYNQLFEENPINASGVDAKAILSARLSKSRRLENLIAQLPGEKKNGLFGNLIALSLGLTPNFKSNFDLAEDAKLQLSKDTYDDDLDNLLAQIGDQYADLFLAAKNLSDAILLSDILRVNTEITKAPLSASMIKRYDEHHQDLTLLKALVRQQLPEKYKEIFFDQSKNGYAGYIDGGASQEEFYKFIKPILEKMDGTEELLVKLNREDLLRKQRTFDNGSIPHQIHLGELHAILRRQEDFYPFLKDNREKIEKILTFRIPYYVGPLARGNSRFAWMTRKSEETITPWNFEEVVDKGASAQSFIERMTNFDKNLPNEKVLPKHSLLYEYFTVYNELTKVKYVTEGMRKPAFLSGEQKKAIVDLLFKTNRKVTVKQLKEDYFKKIECFDSVEISGVEDRFNASLGTYHDLLKIIKDKDFLDNEENEDILEDIVLTLTLFEDREMIEERLKTYAHLFDDKVMKQLKRRRYTGWGRLSRKLINGIRDKQSGKTILDFLKSDGFANRNFMQLIHDDSLTFKEDIQKAQVSGQGDSLHEHIANLAGSPAIKKGILQTVKVVDELVKVMGRHKPENIVIEMARENQTTQKGQKNSRERMKRIEEGIKELGSQILKEHPVENTQLQNEKLYLYYLQNGRDMYVDQELDINRLSDYDVDHIVPQSFLKDDSIDNKVLTRSDKARGKSDNVPSEEVVKKMKNYWRQLLNAKLITQRKFDNLTKAERGGLSELDKAGFIKRQLVETRQITKHVAQILDSRMNTKYDENDKLIREVKVITLKSKLVSDFRKDFQFYKVREINNYHHAHDAYLNAVVGTALIKKYPKLESEFVYGDYKVYDVRKMIAKSEQEIGKATAKYFFYSNIMNFFKTEITLANGEIRKRPLIETNGETGEIVWDKGRDFATVRKVLSMPQVNIVKKTEVQTGGFSKESILPKRNSDKLIARKKDWDPKKYGGFDSPTVAYSVLVVAKVEKGKSKKLKSVKELLGITIMERSSFEKNPIDFLEAKGYKEVKKDLIIKLPKYSLFELENGRKRMLASAGELQKGNELALPSKYVNFLYLASHYEKLKGSPEDNEQKQLFVEQHKHYLDEIIEQISEFSKRVILADANLDKVLSAYNKHRDKPIREQAENIIHLFTLTNLGAPAAFKYFDTTIDRKRYTSTKEVLDATLIHQSITGLYETRIDLSQLGGDGGEAAAKGSSGGGGGTAPLEEEYRLFLEAPIQNVTLLEQWKREIPKVWAEINPPGLASTQAPIHVQLLSTALPVRVRQYPITLEAKRSLRETIRKFRAAGILRPVHSPWNTPLLPVRKSGTSEYRMVQDLREVNKRVETIHPTVPNPYTLLSLLPPDRIWYSVLDLKDAFFCIPLAPESQLIFAFEWADAEEGESGQLTWTRLPQGFKNSPTLFNEALNRDLQGFRLDHPSVSLLQYVDDLLIAADTQAACLSATRDLLMTLAELGYRVSGKKAQLCQEEVTYLGFKIHKGSRSLSNSRTQAILQIPVPKTKRQVREFLGTIGYCRLWIPGFAELAQPLYAATRPGNDPLVWGEKEEEAFQSLKLALTQPPALALPSLDKPFQLFVEETSGAAKGVLTQALGPWKRPVAYLSKRLDPVAAGWPRCLRAIAAAALLTREASKLTFGQDIEITSSHNLESLLRSPPDKWLTNARITQYQVLLLDPPRVRFKQTAALNPATLLPETDDTLPIHHCLDTLDSLTSTRPDLTDQPLAQAEATLFTDGSSYIRDGKRYAGAAVVTLDSVIWAEPLPIGTSAQKAELIALTKALEWSKDKSVNIYTDSRYAFATLHVHGMIYRERGWLTAGGKAIKNAPEILALLTAVWLPKRVAVMHCKGHQKDDAPTSTGNRRADEVAREVAIRPLSTQATISAGKRTADGSEFEKRTADGSEFESPKKKAKVE

SEQ ID NO: 7337 - protein, 2173 aa, synthetic construct
MPAAKRVKLDGGDKKYSIGLDIGTNSVGWAVITDEYKVPSKKFKVLGNTDRHSIKKNLIGALLFDSGETAEATRLKRTARRRYTRRKNRICYLQEIFSNEMAKVDDSFFHRLEESFLVEEDKKHERHPIFGNIVDEVAYHEKYPTIYHLRKKLVDSTDKADLRLIYLALAHMIKFRGHFLIEGDLNPDNSDVDKLFIQLVQTYNQLFEENPINASGVDAKAILSARLSKSRRLENLIAQLPGEKKNGLFGNLIALSLGLTPNFKSNFDLAEDAKLQLSKDTYDDDLDNLLAQIGDQYADLFLAAKNLSDAILLSDILRVNTEITKAPLSASMIKRYDEHHQDLTLLKALVRQQLPEKYKEIFFDQSKNGYAGYIDGGASQEEFYKFIKPILEKMDGTEELLVKLNREDLLRKQRTFDNGSIPHQIHLGELHAILRRQEDFYPFLKDNREKIEKILTFRIPYYVGPLARGNSRFAWMTRKSEETITPWNFEEVVDKGASAQSFIERMTNFDKNLPNEKVLPKHSLLYEYFTVYNELTKVKYVTEGMRKPAFLSGEQKKAIVDLLFKTNRKVTVKQLKEDYFKKIECFDSVEISGVEDRFNASLGTYHDLLKIIKDKDFLDNEENEDILEDIVLTLTLFEDREMIEERLKTYAHLFDDKVMKQLKRRRYTGWGRLSRKLINGIRDKQSGKTILDFLKSDGFANRNFMQLIHDDSLTFKEDIQKAQVSGQGDSLHEHIANLAGSPAIKKGILQTVKVVDELVKVMGRHKPENIVIEMARENQTTQKGQKNSRERMKRIEEGIKELGSQILKEHPVENTQLQNEKLYLYYLQNGRDMYVDQELDINRLSDYDVDHIVPQSFLKDDSIDNKVLTRSDKARGKSDNVPSEEVVKKMKNYWRQLLNAKLITQRKFDNLTKAERGGLSELDKAGFIKRQLVETRQITKHVAQILDSRMNTKYDENDKLIREVKVITLKSKLVSDFRKDFQFYKVREINNYHHAHDAYLNAVVGTALIKKYPKLESEFVYGDYKVYDVRKMIAKSEQEIGKATAKYFFYSNIMNFFKTEITLANGEIRKRPLIETNGETGEIVWDKGRDFATVRKVLSMPQVNIVKKTEVQTGGFSKESILPKRNSDKLIARKKDWDPKKYGGFDSPTVAYSVLVVAKVEKGKSKKLKSVKELLGITIMERSSFEKNPIDFLEAKGYKEVKKDLIIKLPKYSLFELENGRKRMLASAGELQKGNELALPSKYVNFLYLASHYEKLKGSPEDNEQKQLFVEQHKHYLDEIIEQISEFSKRVILADANLDKVLSAYNKHRDKPIREQAENIIHLFTLTNLGAPAAFKYFDTTIDRKRYTSTKEVLDATLIHQSITGLYETRIDLSQLGGDGGEAAAKGSSGGGGGMDLLKPLTVERKGVKIKGYWNSQADITCVPKDLLQGEEPVRQQNVTTIHGTQEGDVYYVNLKIDGRRINTEVIGTTLDYAIITPGDVPWILKKPLELTIKLDLEEQQGTLLNNSILSKKGKEELKQLFEKYSALWQSWENQVGHRRIRPHKIATGTVKPTPQKQYHINPKAKPDIQIVINDLLKQGVLIQKESTMNTPVYPVPKPNGRWRMVLDYRAVNKVTPLIAVQNQHSYGILGSLFKGRYKTTIDLSNGFWAHPIVPEDYWITAFTWQGKQYCWTVLPQGFLNSPGLFTGDVVDLLQGIPNVEVYVDDVYISHDSEKEHLEYLDILFNRLKEAGYIISLKKSNIANSIVDFLGFQITNEGRGLTDTFKEKLENITAPTTLKQLQSILGLLNFARNFIPDFTELIAPLYALIPKSTKNYVPWQIEHSTTLETLITKLNGAEYLQGRKGDKTLIMKVNASYTTGYIRYYNEGEKKPISYVSIVFSKTELKFTELEKLLTTVHKGLLKALDLSMGQNIHVYSPIVSMQNIQKTPQTAKKALASRWLSWLSYLEDPRIRFFYDPQMPALKDLPAVDTGKDNKKHPSNFQHIFYTDGSAITSPTKEGHLNAGMGIVYFINKDGNLQKQQEWSISLGNHTAQFAEIAAFEFALKKCLPLGGNILVVTDSNYVAKAYNEELDVWASNGFVNNRKKPLKHISKWKSVADLKRLRPDVVVTHEPGHQKLDSSPHAYGNNLADQLATQASFKVHAGKRTADGSEFEKRTADGSEFESPKKKAKVE

SEQ ID NO: 7338 - protein, 2127 aa, synthetic construct
MPAAKRVKLDGGDKKYSIGLDIGTNSVGWAVITDEYKVPSKKFKVLGNTDRHSIKKNLIGALLFDSGETAEATRLKRTARRRYTRRKNRICYLQEIFSNEMAKVDDSFFHRLEESFLVEEDKKHERHPIFGNIVDEVAYHEKYPTIYHLRKKLVDSTDKADLRLIYLALAHMIKFRGHFLIEGDLNPDNSDVDKLFIQLVQTYNQLFEENPINASGVDAKAILSARLSKSRRLENLIAQLPGEKKNGLFGNLIALSLGLTPNFKSNFDLAEDAKLQLSKDTYDDDLDNLLAQIGDQYADLFLAAKNLSDAILLSDILRVNTEITKAPLSASMIKRYDEHHQDLTLLKALVRQQLPEKYKEIFFDQSKNGYAGYIDGGASQEEFYKFIKPILEKMDGTEELLVKLNREDLLRKQRTFDNGSIPHQIHLGELHAILRRQEDFYPFLKDNREKIEKILTFRIPYYVGPLARGNSRFAWMTRKSEETITPWNFEEVVDKGASAQSFIERMTNFDKNLPNEKVLPKHSLLYEYFTVYNELTKVKYVTEGMRKPAFLSGEQKKAIVDLLFKTNRKVTVKQLKEDYFKKIECFDSVEISGVEDRFNASLGTYHDLLKIIKDKDFLDNEENEDILEDIVLTLTLFEDREMIEERLKTYAHLFDDKVMKQLKRRRYTGWGRLSRKLINGIRDKQSGKTILDFLKSDGFANRNFMQLIHDDSLTFKEDIQKAQVSGQGDSLHEHIANLAGSPAIKKGILQTVKVVDELVKVMGRHKPENIVIEMARENQTTQKGQKNSRERMKRIEEGIKELGSQILKEHPVENTQLQNEKLYLYYLQNGRDMYVDQELDINRLSDYDVDHIVPQSFLKDDSIDNKVLTRSDKARGKSDNVPSEEVVKKMKNYWRQLLNAKLITQRKFDNLTKAERGGLSELDKAGFIKRQLVETRQITKHVAQILDSRMNTKYDENDKLIREVKVITLKSKLVSDFRKDFQFYKVREINNYHHAHDAYLNAVVGTALIKKYPKLESEFVYGDYKVYDVRKMIAKSEQEIGKATAKYFFYSNIMNFFKTEITLANGEIRKRPLIETNGETGEIVWDKGRDFATVRKVLSMPQVNIVKKTEVQTGGFSKESILPKRNSDKLIARKKDWDPKKYGGFDSPTVAYSVLVVAKVEKGKSKKLKSVKELLGITIMERSSFEKNPIDFLEAKGYKEVKKDLIIKLPKYSLFELENGRKRMLASAGELQKGNELALPSKYVNFLYLASHYEKLKGSPEDNEQKQLFVEQHKHYLDEIIEQISEFSKRVILADANLDKVLSAYNKHRDKPIREQAENIIHLFTLTNLGAPAAFKYFDTTIDRKRYTSTKEVLDATLIHQSITGLYETRIDLSQLGGDGGEAAAKGSSGGGGGLLGRDLLTKLKAQIQFSTEGPQVTWEDRPAMCLVLNLEEEYRLHEKPVPPSIDPSWLQLFPMVWAEKAGMGLANQVPPVVVELKSDASPVAVRQYPMSKEAREGIRPHIQRFLDLGILVPCQSPWNTPLLPVKKPGTNDYRPVQDLREVNKRVQDIHPTVPNPYNLLSSLPPSHTWYSVLDLKDAFFCLKLHPNSQPLFAFEWRDPEKGNTGQLTWTRLPQGFKNSPTLFNEALHRDLASFRALNPQVVMLQYVDDLLVAAPTYRDCKEGTRRLLQELSKLGYRVSAKKAQLCREEVTYLGYLLKGGKRWLTPARKATVMKIPTPTTPRQVREFLGTAGFCRLWIPGFASLAAPLYPLTRPKVPFTWTEAHQEAFGRIKEALLSAPALALPDLTKPFALYVDEKEGVARGVLTQTLGPWRRPVAYLSKKLDPVASGWPTCLKAIAAVALLLKDADKLTLGQNVLVIAPHNLESIVRQPPDRWMTNARMTHYQSLLLNERVSFAPPAILNPATLLPVESDDTPIHICSEILAEETGTRPDLRDQPLPGVPAWYTDGSSFIMDGRRQAGAAIVDNKRTVWASNLPEGTSAQKAELIALTQALRLAEGKSINIYTDSRYAFATAHVHGAIYKQRGWLTSAGKDIKNKEEILALLEAIHLPKRVAIIHCPGHQRGTDPVATGNRKADEAAKQAAQSTRILTETTKNAGKRTADGSEFEKRTADGSEFESPKKKAKVE

SEQ ID NO: 7339 - protein, 2218 aa, synthetic construct
MPAAKRVKLDGGDKKYSIGLDIGTNSVGWAVITDEYKVPSKKFKVLGNTDRHSIKKNLIGALLFDSGETAEATRLKRTARRRYTRRKNRICYLQEIFSNEMAKVDDSFFHRLEESFLVEEDKKHERHPIFGNIVDEVAYHEKYPTIYHLRKKLVDSTDKADLRLIYLALAHMIKFRGHFLIEGDLNPDNSDVDKLFIQLVQTYNQLFEENPINASGVDAKAILSARLSKSRRLENLIAQLPGEKKNGLFGNLIALSLGLTPNFKSNFDLAEDAKLQLSKDTYDDDLDNLLAQIGDQYADLFLAAKNLSDAILLSDILRVNTEITKAPLSASMIKRYDEHHQDLTLLKALVRQQLPEKYKEIFFDQSKNGYAGYIDGGASQEEFYKFIKPILEKMDGTEELLVKLNREDLLRKQRTFDNGSIPHQIHLGELHAILRRQEDFYPFLKDNREKIEKILTFRIPYYVGPLARGNSRFAWMTRKSEETITPWNFEEVVDKGASAQSFIERMTNFDKNLPNEKVLPKHSLLYEYFTVYNELTKVKYVTEGMRKPAFLSGEQKKAIVDLLFKTNRKVTVKQLKEDYFKKIECFDSVEISGVEDRFNASLGTYHDLLKIIKDKDFLDNEENEDILEDIVLTLTLFEDREMIEERLKTYAHLFDDKVMKQLKRRRYTGWGRLSRKLINGIRDKQSGKTILDFLKSDGFANRNFMQLIHDDSLTFKEDIQKAQVSGQGDSLHEHIANLAGSPAIKKGILQTVKVVDELVKVMGRHKPENIVIEMARENQTTQKGQKNSRERMKRIEEGIKELGSQILKEHPVENTQLQNEKLYLYYLQNGRDMYVDQELDINRLSDYDVDHIVPQSFLKDDSIDNKVLTRSDKARGKSDNVPSEEVVKKMKNYWRQLLNAKLITQRKFDNLTKAERGGLSELDKAGFIKRQLVETRQITKHVAQILDSRMNTKYDENDKLIREVKVITLKSKLVSDFRKDFQFYKVREINNYHHAHDAYLNAVVGTALIKKYPKLESEFVYGDYKVYDVRKMIAKSEQEIGKATAKYFFYSNIMNFFKTEITLANGEIRKRPLIETNGETGEIVWDKGRDFATVRKVLSMPQVNIVKKTEVQTGGFSKESILPKRNSDKLIARKKDWDPKKYGGFDSPTVAYSVLVVAKVEKGKSKKLKSVKELLGITIMERSSFEKNPIDFLEAKGYKEVKKDLIIKLPKYSLFELENGRKRMLASAGELQKGNELALPSKYVNFLYLASHYEKLKGSPEDNEQKQLFVEQHKHYLDEIIEQISEFSKRVILADANLDKVLSAYNKHRDKPIREQAENIIHLFTLTNLGAPAAFKYFDTTIDRKRYTSTKEVLDATLIHQSITGLYETRIDLSQLGGDGGEAAAKGSSGGGGGTLGDQGSRGSDPLPEPRVTLTVEGIPTEFLVNTGAEHSVLTKPMGKMGSKRTVVAGATGSKVYPWTTKRLLKIGQKQVTHSFLVIPECPAPLLGRDLLTKLKAQIQFSTEGPQVTWEDRPAMCLVLNLEEEYRLHEKPVPPSIDPSWLQLFPMVWAEKAGMGLANQVPPVVVELKSDASPVAVRQYPMSKEAREGIRPHIQRFLDLGILVPCQSPWNTPLLPVKKPGTNDYRPVQDLREVNKRVQDIHPTVPNPYNLLSSLPPSHTWYSVLDLKDAFFCLKLHPNSQPLFAFEWRDPEKGNTGQLTWTRLPQGFKNSPTLFNEALHRDLASFRALNPQVVMLQYVDDLLVAAPTYRDCKEGTRRLLQELSKLGYRVSAKKAQLCREEVTYLGYLLKGGKRWLTPARKATVMKIPTPTTPRQVREFLGKAGFCRLFIPGFASLAAPLYPLTRPKVPFTWTEAHQEAFGRIKEALLSAPALALPDLTKPFALYVDEKEGVARGVLTQTLGPWRRPVAYLSKKLDPVASGWPTCLKAIAAVALLLKDADKLTLGQNVLVIAPHNLESIVRQPPDRWMTNARMTHYQSLLLNERVSFAPPAILNPATLLPVESDDTPIHICSEILAEETGTRPDLRDQPLPGVPAWYTDGSSFIMDGRRQAGAAIVDNKRTVWASNLPEGTSAQKAELIALTQALRLAEGKSINIYTDSRYAFATAHVHGAIYKQRGWLTSAGKDIKNKEEILALLEAIHLPKRVAIIHCPGHQRGTDPVATGNRKADEAAKQAAQSTRILTETTKNAGKRTADGSEFEKRTADGSEFESPKKKAKVE

SEQ ID NO: 7340 - protein, 2096 aa, synthetic construct
MPAAKRVKLDGGDKKYSIGLDIGTNSVGWAVITDEYKVPSKKFKVLGNTDRHSIKKNLIGALLFDSGETAEATRLKRTARRRYTRRKNRICYLQEIFSNEMAKVDDSFFHRLEESFLVEEDKKHERHPIFGNIVDEVAYHEKYPTIYHLRKKLVDSTDKADLRLIYLALAHMIKFRGHFLIEGDLNPDNSDVDKLFIQLVQTYNQLFEENPINASGVDAKAILSARLSKSRRLENLIAQLPGEKKNGLFGNLIALSLGLTPNFKSNFDLAEDAKLQLSKDTYDDDLDNLLAQIGDQYADLFLAAKNLSDAILLSDILRVNTEITKAPLSASMIKRYDEHHQDLTLLKALVRQQLPEKYKEIFFDQSKNGYAGYIDGGASQEEFYKFIKPILEKMDGTEELLVKLNREDLLRKQRTFDNGSIPHQIHLGELHAILRRQEDFYPFLKDNREKIEKILTFRIPYYVGPLARGNSRFAWMTRKSEETITPWNFEEVVDKGASAQSFIERMTNFDKNLPNEKVLPKHSLLYEYFTVYNELTKVKYVTEGMRKPAFLSGEQKKAIVDLLFKTNRKVTVKQLKEDYFKKIECFDSVEISGVEDRFNASLGTYHDLLKIIKDKDFLDNEENEDILEDIVLTLTLFEDREMIEERLKTYAHLFDDKVMKQLKRRRYTGWGRLSRKLINGIRDKQSGKTILDFLKSDGFANRNFMQLIHDDSLTFKEDIQKAQVSGQGDSLHEHIANLAGSPAIKKGILQTVKVVDELVKVMGRHKPENIVIEMARENQTTQKGQKNSRERMKRIEEGIKELGSQILKEHPVENTQLQNEKLYLYYLQNGRDMYVDQELDINRLSDYDVDHIVPQSFLKDDSIDNKVLTRSDKARGKSDNVPSEEVVKKMKNYWRQLLNAKLITQRKFDNLTKAERGGLSELDKAGFIKRQLVETRQITKHVAQILDSRMNTKYDENDKLIREVKVITLKSKLVSDFRKDFQFYKVREINNYHHAHDAYLNAVVGTALIKKYPKLESEFVYGDYKVYDVRKMIAKSEQEIGKATAKYFFYSNIMNFFKTEITLANGEIRKRPLIETNGETGEIVWDKGRDFATVRKVLSMPQVNIVKKTEVQTGGFSKESILPKRNSDKLIARKKDWDPKKYGGFDSPTVAYSVLVVAKVEKGKSKKLKSVKELLGITIMERSSFEKNPIDFLEAKGYKEVKKDLIIKLPKYSLFELENGRKRMLASAGELQKGNELALPSKYVNFLYLASHYEKLKGSPEDNEQKQLFVEQHKHYLDEIIEQISEFSKRVILADANLDKVLSAYNKHRDKPIREQAENIIHLFTLTNLGAPAAFKYFDTTIDRKRYTSTKEVLDATLIHQSITGLYETRIDLSQLGGDGGEAAAKGSSGGGGGTLGIEDEYRLHETSTEPDVSLGSTWLSDFPQAWAETGGMGLAVRQAPLIIPLKATSTPVSIQQYPMSHEARLGIKPHIQRLLDQGILVPCQSPWNTPLLPVKKPGTNDYRPVQDLREVNKRVEDIHPTVPNPYNLLSGLPPSHQWYTVLDLKDAFFCLRLHPTSQPLFAFEWRDPGMGISGQLTWTRLPQGFKNSPTLFNEALHRDLADFRIQHPDLILLQYVDDILLAATSELDCQQGTRALLQTLGDLGYRASAKKAQICQKQVKYLGYLLREGQRWLTEARKETVMGQPVPKTPRQLREFLGTAGFCRLWIPGFAEMAAPLYPLTKPGTLFSWGPDQQKAYQEIKQALLTAPALGLPDLTKPFELFVDEKQGYAKGVLTQKLGPWRRPVAYLSKKLDPVAAGWPPCLRMVAAIAVLTKDAGKLTMGQPLVILAPHAVEALVKQPPDRWLSNARMTHYQAMLLDTDRVQFGPVVALNPATLLPLPEEGAPHDCLEILAETHGTRPDLTDQPIPDADHTWYTDGSSFLQEGQRKAGAAVTTETEVIWAGALPAGTSAQRAELIALTQALKMAEGKRLNVYTDSRYAFATAHIHGEIYRRRGWLTSEGREIKNKSEILALLKALFLPKRLSIIHCLGHQKGDSAEARGNRLADQAAREAAIKTPPDTSTLLAGKRTADGSEFEKRTADGSEFESPKKKAKVE

SEQ ID NO: 7341 - protein, 2096 aa, synthetic construct
MPAAKRVKLDGGDKKYSIGLDIGTNSVGWAVITDEYKVPSKKFKVLGNTDRHSIKKNLIGALLFDSGETAEATRLKRTARRRYTRRKNRICYLQEIFSNEMAKVDDSFFHRLEESFLVEEDKKHERHPIFGNIVDEVAYHEKYPTIYHLRKKLVDSTDKADLRLIYLALAHMIKFRGHFLIEGDLNPDNSDVDKLFIQLVQTYNQLFEENPINASGVDAKAILSARLSKSRRLENLIAQLPGEKKNGLFGNLIALSLGLTPNFKSNFDLAEDAKLQLSKDTYDDDLDNLLAQIGDQYADLFLAAKNLSDAILLSDILRVNTEITKAPLSASMIKRYDEHHQDLTLLKALVRQQLPEKYKEIFFDQSKNGYAGYIDGGASQEEFYKFIKPILEKMDGTEELLVKLNREDLLRKQRTFDNGSIPHQIHLGELHAILRRQEDFYPFLKDNREKIEKILTFRIPYYVGPLARGNSRFAWMTRKSEETITPWNFEEVVDKGASAQSFIERMTNFDKNLPNEKVLPKHSLLYEYFTVYNELTKVKYVTEGMRKPAFLSGEQKKAIVDLLFKTNRKVTVKQLKEDYFKKIECFDSVEISGVEDRFNASLGTYHDLLKIIKDKDFLDNEENEDILEDIVLTLTLFEDREMIEERLKTYAHLFDDKVMKQLKRRRYTGWGRLSRKLINGIRDKQSGKTILDFLKSDGFANRNFMQLIHDDSLTFKEDIQKAQVSGQGDSLHEHIANLAGSPAIKKGILQTVKVVDELVKVMGRHKPENIVIEMARENQTTQKGQKNSRERMKRIEEGIKELGSQILKEHPVENTQLQNEKLYLYYLQNGRDMYVDQELDINRLSDYDVDHIVPQSFLKDDSIDNKVLTRSDKARGKSDNVPSEEVVKKMKNYWRQLLNAKLITQRKFDNLTKAERGGLSELDKAGFIKRQLVETRQITKHVAQILDSRMNTKYDENDKLIREVKVITLKSKLVSDFRKDFQFYKVREINNYHHAHDAYLNAVVGTALIKKYPKLESEFVYGDYKVYDVRKMIAKSEQEIGKATAKYFFYSNIMNFFKTEITLANGEIRKRPLIETNGETGEIVWDKGRDFATVRKVLSMPQVNIVKKTEVQTGGFSKESILPKRNSDKLIARKKDWDPKKYGGFDSPTVAYSVLVVAKVEKGKSKKLKSVKELLGITIMERSSFEKNPIDFLEAKGYKEVKKDLIIKLPKYSLFELENGRKRMLASAGELQKGNELALPSKYVNFLYLASHYEKLKGSPEDNEQKQLFVEQHKHYLDEIIEQISEFSKRVILADANLDKVLSAYNKHRDKPIREQAENIIHLFTLTNLGAPAAFKYFDTTIDRKRYTSTKEVLDATLIHQSITGLYETRIDLSQLGGDGGEAAAKGSSGGGGGTLGIEDEYRLHETSTEPDVSLGSTWLSDFPQAWAETGGMGLAVRQAPLIIPLKATSTPVSIQQYPMSHEARLGIKPHIQRLLDQGILVPCQSPWNTPLLPVKKPGTNDYRPVQDLREVNKRVEDIHPTVPNPYNLLSGLPPSHQWYTVLDLKDAFFCLRLHPTSQPLFAFEWRDPGMGISGQLTWTRLPQGFKNSPTLFDEALHRDLADFRIQHPDLILLQYVDDILLAATSELDCQQGTRALLQTLGDLGYRASAKKAQICQKQVKYLGYLLREGQRWLTEARKETVMGQPVPKTPRQLREFLGTAGFCRLWIPGFAEMAAPLYPLTKTGTLFSWGPDQQKAYQEIKQALLTAPALGLPDLTKPFELFVDEKQGYAKGVLTQKLGPWRRPVAYLSKKLDPVAAGWPPCLRMVAAIAVLTKDAGKLTMGQPLVILAPHAVEALVKQPPDRWLSNARMTHYQAMLLDTDRVQFGPVVALNPATLLPLPEEGAPHDCLEILAETHGTRPDLTDQPIPDADHTWYTDGSSFLQEGQRKAGAAVTTETEVIWAGALPAGTSAQRAELIALTQALKMAEGKRLNVYTDSRYAFATAHIHGEIYRRRGLLTSEGREIKNKSEILALLKALFLPKRLSIIHCLGHQKGDSAEARGNRLADQAAREAAIKTPPDTSTLLAGKRTADGSEFEKRTADGSEFESPKKKAKVE

SEQ ID NO: 7342 - protein, 2096 aa, synthetic construct
MPAAKRVKLDGGDKKYSIGLDIGTNSVGWAVITDEYKVPSKKFKVLGNTDRHSIKKNLIGALLFDSGETAEATRLKRTARRRYTRRKNRICYLQEIFSNEMAKVDDSFFHRLEESFLVEEDKKHERHPIFGNIVDEVAYHEKYPTIYHLRKKLVDSTDKADLRLIYLALAHMIKFRGHFLIEGDLNPDNSDVDKLFIQLVQTYNQLFEENPINASGVDAKAILSARLSKSRRLENLIAQLPGEKKNGLFGNLIALSLGLTPNFKSNFDLAEDAKLQLSKDTYDDDLDNLLAQIGDQYADLFLAAKNLSDAILLSDILRVNTEITKAPLSASMIKRYDEHHQDLTLLKALVRQQLPEKYKEIFFDQSKNGYAGYIDGGASQEEFYKFIKPILEKMDGTEELLVKLNREDLLRKQRTFDNGSIPHQIHLGELHAILRRQEDFYPFLKDNREKIEKILTFRIPYYVGPLARGNSRFAWMTRKSEETITPWNFEEVVDKGASAQSFIERMTNFDKNLPNEKVLPKHSLLYEYFTVYNELTKVKYVTEGMRKPAFLSGEQKKAIVDLLFKTNRKVTVKQLKEDYFKKIECFDSVEISGVEDRFNASLGTYHDLLKIIKDKDFLDNEENEDILEDIVLTLTLFEDREMIEERLKTYAHLFDDKVMKQLKRRRYTGWGRLSRKLINGIRDKQSGKTILDFLKSDGFANRNFMQLIHDDSLTFKEDIQKAQVSGQGDSLHEHIANLAGSPAIKKGILQTVKVVDELVKVMGRHKPENIVIEMARENQTTQKGQKNSRERMKRIEEGIKELGSQILKEHPVENTQLQNEKLYLYYLQNGRDMYVDQELDINRLSDYDVDHIVPQSFLKDDSIDNKVLTRSDKARGKSDNVPSEEVVKKMKNYWRQLLNAKLITQRKFDNLTKAERGGLSELDKAGFIKRQLVETRQITKHVAQILDSRMNTKYDENDKLIREVKVITLKSKLVSDFRKDFQFYKVREINNYHHAHDAYLNAVVGTALIKKYPKLESEFVYGDYKVYDVRKMIAKSEQEIGKATAKYFFYSNIMNFFKTEITLANGEIRKRPLIETNGETGEIVWDKGRDFATVRKVLSMPQVNIVKKTEVQTGGFSKESILPKRNSDKLIARKKDWDPKKYGGFDSPTVAYSVLVVAKVEKGKSKKLKSVKELLGITIMERSSFEKNPIDFLEAKGYKEVKKDLIIKLPKYSLFELENGRKRMLASAGELQKGNELALPSKYVNFLYLASHYEKLKGSPEDNEQKQLFVEQHKHYLDEIIEQISEFSKRVILADANLDKVLSAYNKHRDKPIREQAENIIHLFTLTNLGAPAAFKYFDTTIDRKRYTSTKEVLDATLIHQSITGLYETRIDLSQLGGDGGEAAAKGSSGGGGGTLNIEDEYRLHETSKEPDVSLGSTWLSDFPQAWAETGGMGLAVRQAPLIIPLKATSTPVSIKQYPMSQEARLGIKPHIQRLLDQGILVPCQSPWNTPLLPVKKPGTNDYRPVQDLREVNKRVEDIHPTVPNPYNLLSGLPPSHQWYTVLDLKDAFFCLRLHPTSQPLFAFEWRDPEMGISGQLTWTRLPQGFKNSPTLFNEALHRDLAGFRIQHPDLILLQYVDDLLLAATSELDCQQGTRALLQTLGDLGYRASAKKAQICQKQVKYLGYLLKEGQRWLTEARKETVMGQPIPKTPRQLREFLGTAGFCRLWIPGFAEMAAPLYPLTKPGTLFNWGPDQQKAFQEIKQALLTAPALGLPDLTKPFELFVDEKQGYAKGVLTQKLGPWRRPVAYLSKKLDPVAAGWPPCLRMVAAIAVLTKDAGKLTMGQPLVILAPHAVEALVKQPPDRWLSNARMTHYQALLLDTDRVQFGPVVALNPATLLPLPEEGLQHDCLDILAEAHGTRSDLMDQPLPDADHTWYTDGSSFLQEGQRKAGAAVTTETEVIWARALPAGTSAQRAELIALTQALKMAEGKKLNVYTDSRYAFATAHIHGEIYRRRGWLTSEGKEIKNKDEILALLKALFLPKRLSIIHCPGHQKGNSAEARGNRMADQAAREVATRETPETSTLLAGKRTADGSEFEKRTADGSEFESPKKKAKVE

SEQ ID NO: 7343 - protein, 2096 aa, synthetic construct
MPAAKRVKLDGGDKKYSIGLDIGTNSVGWAVITDEYKVPSKKFKVLGNTDRHSIKKNLIGALLFDSGETAEATRLKRTARRRYTRRKNRICYLQEIFSNEMAKVDDSFFHRLEESFLVEEDKKHERHPIFGNIVDEVAYHEKYPTIYHLRKKLVDSTDKADLRLIYLALAHMIKFRGHFLIEGDLNPDNSDVDKLFIQLVQTYNQLFEENPINASGVDAKAILSARLSKSRRLENLIAQLPGEKKNGLFGNLIALSLGLTPNFKSNFDLAEDAKLQLSKDTYDDDLDNLLAQIGDQYADLFLAAKNLSDAILLSDILRVNTEITKAPLSASMIKRYDEHHQDLTLLKALVRQQLPEKYKEIFFDQSKNGYAGYIDGGASQEEFYKFIKPILEKMDGTEELLVKLNREDLLRKQRTFDNGSIPHQIHLGELHAILRRQEDFYPFLKDNREKIEKILTFRIPYYVGPLARGNSRFAWMTRKSEETITPWNFEEVVDKGASAQSFIERMTNFDKNLPNEKVLPKHSLLYEYFTVYNELTKVKYVTEGMRKPAFLSGEQKKAIVDLLFKTNRKVTVKQLKEDYFKKIECFDSVEISGVEDRFNASLGTYHDLLKIIKDKDFLDNEENEDILEDIVLTLTLFEDREMIEERLKTYAHLFDDKVMKQLKRRRYTGWGRLSRKLINGIRDKQSGKTILDFLKSDGFANRNFMQLIHDDSLTFKEDIQKAQVSGQGDSLHEHIANLAGSPAIKKGILQTVKVVDELVKVMGRHKPENIVIEMARENQTTQKGQKNSRERMKRIEEGIKELGSQILKEHPVENTQLQNEKLYLYYLQNGRDMYVDQELDINRLSDYDVDHIVPQSFLKDDSIDNKVLTRSDKARGKSDNVPSEEVVKKMKNYWRQLLNAKLITQRKFDNLTKAERGGLSELDKAGFIKRQLVETRQITKHVAQILDSRMNTKYDENDKLIREVKVITLKSKLVSDFRKDFQFYKVREINNYHHAHDAYLNAVVGTALIKKYPKLESEFVYGDYKVYDVRKMIAKSEQEIGKATAKYFFYSNIMNFFKTEITLANGEIRKRPLIETNGETGEIVWDKGRDFATVRKVLSMPQVNIVKKTEVQTGGFSKESILPKRNSDKLIARKKDWDPKKYGGFDSPTVAYSVLVVAKVEKGKSKKLKSVKELLGITIMERSSFEKNPIDFLEAKGYKEVKKDLIIKLPKYSLFELENGRKRMLASAGELQKGNELALPSKYVNFLYLASHYEKLKGSPEDNEQKQLFVEQHKHYLDEIIEQISEFSKRVILADANLDKVLSAYNKHRDKPIREQAENIIHLFTLTNLGAPAAFKYFDTTIDRKRYTSTKEVLDATLIHQSITGLYETRIDLSQLGGDGGEAAAKGSSGGGGGTLNIEDEHRLHETSKEPDVSLGSTWLSDFPQAWAETGGMGLAVRQAPLIIPLKATSTPVSIKQYPMSQEARLGIKPHIQRLLDQGILVPCQSPWNTPLLPVKKPGTNDYRPVQDLREVNKRVEDIHPTVPNPYNLLSGLPPSHQWYTVLDLKDAFFCLRLHPTSQPLFAFEWRDPEMGISGQLTWTRLPQGFKNSPTLFNEALHRDLADFRIQHPDLILLQYVDDLLLAATSELDCQQGTRALLQTLGNLGYRASAKKAQICQKQVKYLGYLLKEGQRWLTEARKETVMGQPTPKTPRQLREFLGTAGFCRLWIPGFAEMAAPLYPLTKPGTLFNWGPDQQKAYQEIKQALLTAPALGLPDLTKPFELFVDEKQGYAKGVLTQKLGPWRRPVAYLSKKLDPVAAGWPPCLRMVAAIAVLTKDAGKLTMGQPLVILAPHAVEALVKQPPDRWLSNARMTHYQALLLDTDRVQFGPVVALNPATLLPLPEEGLQHNCLDILAEAHGTRPDLTDQPLPDADHTWYTDGSSLLQEGQRKAGAAVTTETEVIWAKALPAGTSAQRAELIALTQALKMAEGKKLNVYTDSRYAFATAHIHGEIYRRRGWLTSEGKEIKNKDEILALLKALFLPKRLSIIHCPGHQKGHSAEARGNRMADQAARKAAITETPDTSTLLAGKRTADGSEFEKRTADGSEFESPKKKAKVE

SEQ ID NO: 7344 - protein, 2116 aa, synthetic construct
MPAAKRVKLDGGDKKYSIGLDIGTNSVGWAVITDEYKVPSKKFKVLGNTDRHSIKKNLIGALLFDSGETAEATRLKRTARRRYTRRKNRICYLQEIFSNEMAKVDDSFFHRLEESFLVEEDKKHERHPIFGNIVDEVAYHEKYPTIYHLRKKLVDSTDKADLRLIYLALAHMIKFRGHFLIEGDLNPDNSDVDKLFIQLVQTYNQLFEENPINASGVDAKAILSARLSKSRRLENLIAQLPGEKKNGLFGNLIALSLGLTPNFKSNFDLAEDAKLQLSKDTYDDDLDNLLAQIGDQYADLFLAAKNLSDAILLSDILRVNTEITKAPLSASMIKRYDEHHQDLTLLKALVRQQLPEKYKEIFFDQSKNGYAGYIDGGASQEEFYKFIKPILEKMDGTEELLVKLNREDLLRKQRTFDNGSIPHQIHLGELHAILRRQEDFYPFLKDNREKIEKILTFRIPYYVGPLARGNSRFAWMTRKSEETITPWNFEEVVDKGASAQSFIERMTNFDKNLPNEKVLPKHSLLYEYFTVYNELTKVKYVTEGMRKPAFLSGEQKKAIVDLLFKTNRKVTVKQLKEDYFKKIECFDSVEISGVEDRFNASLGTYHDLLKIIKDKDFLDNEENEDILEDIVLTLTLFEDREMIEERLKTYAHLFDDKVMKQLKRRRYTGWGRLSRKLINGIRDKQSGKTILDFLKSDGFANRNFMQLIHDDSLTFKEDIQKAQVSGQGDSLHEHIANLAGSPAIKKGILQTVKVVDELVKVMGRHKPENIVIEMARENQTTQKGQKNSRERMKRIEEGIKELGSQILKEHPVENTQLQNEKLYLYYLQNGRDMYVDQELDINRLSDYDVDHIVPQSFLKDDSIDNKVLTRSDKARGKSDNVPSEEVVKKMKNYWRQLLNAKLITQRKFDNLTKAERGGLSELDKAGFIKRQLVETRQITKHVAQILDSRMNTKYDENDKLIREVKVITLKSKLVSDFRKDFQFYKVREINNYHHAHDAYLNAVVGTALIKKYPKLESEFVYGDYKVYDVRKMIAKSEQEIGKATAKYFFYSNIMNFFKTEITLANGEIRKRPLIETNGETGEIVWDKGRDFATVRKVLSMPQVNIVKKTEVQTGGFSKESILPKRNSDKLIARKKDWDPKKYGGFDSPTVAYSVLVVAKVEKGKSKKLKSVKELLGITIMERSSFEKNPIDFLEAKGYKEVKKDLIIKLPKYSLFELENGRKRMLASAGELQKGNELALPSKYVNFLYLASHYEKLKGSPEDNEQKQLFVEQHKHYLDEIIEQISEFSKRVILADANLDKVLSAYNKHRDKPIREQAENIIHLFTLTNLGAPAAFKYFDTTIDRKRYTSTKEVLDATLIHQSITGLYETRIDLSQLGGDGGEAAAKGSSGGGGGVQEISDSRPMLHIYLNGRRFLGLLDTGADKTCIAGRDWPANWPIHQTESSLQGLGMACGVARSSQPLRWQHEDKSGIIHPFVIPTLPFTLWGRDIMKDIKVRLMTDSPDDSQDLMIGAIESNLFADQISWKSDQPVWLNQWPLKQEKLQALQQLVTEQLQLGHLEESNSPWNTPVFVIKKKSGKWRLLQDLRAVNATMHDMGALQPGLPSPVAVPKGWEIIIIDLQDCFFNIKLHPEDCKRFAFSVPSPNFKRPYQRFQWKVLPQGMKNSPTLCQKFVDKAILTVRDKYQDSYIVHYMDDILLAHPSRSIVDEILTSMIQALNKHGLVVSTEKIQKYDNLKYLGTHIQGDSVSYQKLQIRTDKLRTLNDFQKLLGNINWIRPFLKLTTGELKPLFEILNGDSNPISTRKLTPEACKALQLMNERLSTARVKRLDLSQPWSLCILKTEYTPTACLWQDGVVEWIHLPHISPKVITPYDIFCTQLIIKGRHRSKELFSKDPDYIVVPYTKVQFDLLLQEKEDWPISLLGFLGEVHFHLPKDPLLTFTLQTAIIFPHMTSTTPLEKGIVIFTDGSANGRSVTYIQGREPIIKENTQNTAQQAEIVAVITAFEEVSQPFNLYTDSKYVTGLFPEIETATLSPRTKIYTELKHLQRLIHKRQEKFYIGHIRGHTGLPGPLAQGNAYADSLTRILTAAGKRTADGSEFEKRTADGSEFESPKKKAKVE

SEQ ID NO: 7345 - protein, 2088 aa, synthetic construct
MPAAKRVKLDGGDKKYSIGLDIGTNSVGWAVITDEYKVPSKKFKVLGNTDRHSIKKNLIGALLFDSGETAEATRLKRTARRRYTRRKNRICYLQEIFSNEMAKVDDSFFHRLEESFLVEEDKKHERHPIFGNIVDEVAYHEKYPTIYHLRKKLVDSTDKADLRLIYLALAHMIKFRGHFLIEGDLNPDNSDVDKLFIQLVQTYNQLFEENPINASGVDAKAILSARLSKSRRLENLIAQLPGEKKNGLFGNLIALSLGLTPNFKSNFDLAEDAKLQLSKDTYDDDLDNLLAQIGDQYADLFLAAKNLSDAILLSDILRVNTEITKAPLSASMIKRYDEHHQDLTLLKALVRQQLPEKYKEIFFDQSKNGYAGYIDGGASQEEFYKFIKPILEKMDGTEELLVKLNREDLLRKQRTFDNGSIPHQIHLGELHAILRRQEDFYPFLKDNREKIEKILTFRIPYYVGPLARGNSRFAWMTRKSEETITPWNFEEVVDKGASAQSFIERMTNFDKNLPNEKVLPKHSLLYEYFTVYNELTKVKYVTEGMRKPAFLSGEQKKAIVDLLFKTNRKVTVKQLKEDYFKKIECFDSVEISGVEDRFNASLGTYHDLLKIIKDKDFLDNEENEDILEDIVLTLTLFEDREMIEERLKTYAHLFDDKVMKQLKRRRYTGWGRLSRKLINGIRDKQSGKTILDFLKSDGFANRNFMQLIHDDSLTFKEDIQKAQVSGQGDSLHEHIANLAGSPAIKKGILQTVKVVDELVKVMGRHKPENIVIEMARENQTTQKGQKNSRERMKRIEEGIKELGSQILKEHPVENTQLQNEKLYLYYLQNGRDMYVDQELDINRLSDYDVDHIVPQSFLKDDSIDNKVLTRSDKARGKSDNVPSEEVVKKMKNYWRQLLNAKLITQRKFDNLTKAERGGLSELDKAGFIKRQLVETRQITKHVAQILDSRMNTKYDENDKLIREVKVITLKSKLVSDFRKDFQFYKVREINNYHHAHDAYLNAVVGTALIKKYPKLESEFVYGDYKVYDVRKMIAKSEQEIGKATAKYFFYSNIMNFFKTEITLANGEIRKRPLIETNGETGEIVWDKGRDFATVRKVLSMPQVNIVKKTEVQTGGFSKESILPKRNSDKLIARKKDWDPKKYGGFDSPTVAYSVLVVAKVEKGKSKKLKSVKELLGITIMERSSFEKNPIDFLEAKGYKEVKKDLIIKLPKYSLFELENGRKRMLASAGELQKGNELALPSKYVNFLYLASHYEKLKGSPEDNEQKQLFVEQHKHYLDEIIEQISEFSKRVILADANLDKVLSAYNKHRDKPIREQAENIIHLFTLTNLGAPAAFKYFDTTIDRKRYTSTKEVLDATLIHQSITGLYETRIDLSQLGGDGGEAAAKGSSGGGGGLDDEYRLYSPLVKPDQNIQFWLEQFPQAWAETAGMGLAKQVPPQVIQLKASATPVSVRQYPLSKEAQEGIRPHVQRLIQQGILVPVQSPWNTPLLPVRKPGTNDYRPVQDLREVNKRVQDIHPTVPNPYNLLCALPPQRSWYTVLDLKDAFFCLRLHPTSQPLFAFEWRDPGTGRTGQLTWTRLPQGFKNSPTIFNEALHRDLANFRIQHPQVTLLQYVDDLLLAGATKQDCLEGTKALLLELSDLGYRASAKKAQICRREVTYLGYSLRDGQRWLTEARKKTVVQIPAPTTAKQVREFLGKAGFCRLFIPGFATLAAPLYPLTKPKGEFSWAPEHQKAFDAIKKALLSAPALALPDVTKPFTLYVDERKGVARGVLTQTLGPWRRPVAYLSKKLDPVASGWPVCLKAIAAVAILVKDADKLTLGQNITVIAPHALENIVRQPPDRWMTNARMTHYQSLLLTERVTFAPPAALNPATLLPEETDEPVTHDCHQLLIEETGVRKDLTDIPLTGEVLTWFTDGSSYVVEGKRMAGAAVVDGTRTIWASSLPEGTSAQKAELMALTQALRLAEGKSINIYTDSRYAFATAHVHGAIYKQRGWLTSAGREIKNKEEILSLLEALHLPKRLAIIHCPGHQKAKDPISRGNQMADRVAKQAAQGVNLLPAGKRTADGSEFEKRTADGSEFESPKKKAKVE

SEQ ID NO: 7346 - protein, 2088 aa, synthetic construct; identical to SEQ ID NO: 7345

SEQ ID NO: 7347 - protein, 2087 aa, synthetic construct
MPAAKRVKLDGGDKKYSIGLDIGTNSVGWAVITDEYKVPSKKFKVLGNTDRHSIKKNLIGALLFDSGETAEATRLKRTARRRYTRRKNRICYLQEIFSNEMAKVDDSFFHRLEESFLVEEDKKHERHPIFGNIVDEVAYHEKYPTIYHLRKKLVDSTDKADLRLIYLALAHMIKFRGHFLIEGDLNPDNSDVDKLFIQLVQTYNQLFEENPINASGVDAKAILSARLSKSRRLENLIAQLPGEKKNGLFGNLIALSLGLTPNFKSNFDLAEDAKLQLSKDTYDDDLDNLLAQIGDQYADLFLAAKNLSDAILLSDILRVNTEITKAPLSASMIKRYDEHHQDLTLLKALVRQQLPEKYKEIFFDQSKNGYAGYIDGGASQEEFYKFIKPILEKMDGTEELLVKLNREDLLRKQRTFDNGSIPHQIHLGELHAILRRQEDFYPFLKDNREKIEKILTFRIPYYVGPLARGNSRFAWMTRKSEETITPWNFEEVVDKGASAQSFIERMTNFDKNLPNEKVLPKHSLLYEYFTVYNELTKVKYVTEGMRKPAFLSGEQKKAIVDLLFKTNRKVTVKQLKEDYFKKIECFDSVEISGVEDRFNASLGTYHDLLKIIKDKDFLDNEENEDILEDIVLTLTLFEDREMIEERLKTYAHLFDDKVMKQLKRRRYTGWGRLSRKLINGIRDKQSGKTILDFLKSDGFANRNFMQLIHDDSLTFKEDIQKAQVSGQGDSLHEHIANLAGSPAIKKGILQTVKVVDELVKVMGRHKPENIVIEMARENQTTQKGQKNSRERMKRIEEGIKELGSQILKEHPVENTQLQNEKLYLYYLQNGRDMYVDQELDINRLSDYDVDHIVPQSFLKDDSIDNKVLTRSDKARGKSDNVPSEEVVKKMKNYWRQLLNAKLITQRKFDNLTKAERGGLSELDKAGFIKRQLVETRQITKHVAQILDSRMNTKYDENDKLIREVKVITLKSKLVSDFRKDFQFYKVREINNYHHAHDAYLNAVVGTALIKKYPKLESEFVYGDYKVYDVRKMIAKSEQEIGKATAKYFFYSNIMNFFKTEITLANGEIRKRPLIETNGETGEIVWDKGRDFATVRKVLSMPQVNIVKKTEVQTGGFSKESILPKRNSDKLIARKKDWDPKKYGGFDSPTVAYSVLVVAKVEKGKSKKLKSVKELLGITIMERSSFEKNPIDFLEAKGYKEVKKDLIIKLPKYSLFELENGRKRMLASAGELQKGNELALPSKYVNFLYLASHYEKLKGSPEDNEQKQLFVEQHKHYLDEIIEQISEFSKRVILADANLDKVLSAYNKHRDKPIREQAENIIHLFTLTNLGAPAAFKYFDTTIDRKRYTSTKEVLDATLIHQSITGLYETRIDLSQLGGDGGEAAAKGSSGGGGGIPWLMKKPLQLTTLVPLQEYEERLLKQTMLTGSYKEKLQSLFLKYDALWQHWENQVGHRRIKPHHIATGTVNPRPQKQYPINPKAKASIQTVINDLLKQGVLIQQNSIMNTPVYPVPKPDGKWRMVLDYREVNKTIPLIAAQNQHSAGILSSIFRGKYKTTLDLSNGFWAHSITPESYWLTAFTWLGQQYCWTRLPQGFLNSPALFNADVVDLLKEVPNVQVYVDDIYISHDDPREHLEQLEKVFSLLLNAGYVVSLKKSEIAQHEVEFLGFNITKEGRGLTETFKQKLLNITPPRDLKQLQSILGKLNFARNFIPNFSELVKPLYNIIATAPGKYITWTTDNSQQLQNIISMLNSAENLEERNPEVRLIMKVNTSPSAGYIRFYNEFAKRPIMYLNYVYTKAEVKFTNTEKLLTTIHKGLIKALDLGMGQEILVYSPIVSMTKIQKTPLPERKALPIRWITWMSYLEDPRIQFHYDKTLPELQQVPTVTDDIIAKIKHPSEFSMVFYTDGSAIKHPNVNKSHNAGMGIAQVQFKPEFTVINTWSIPLGDHTAQLAEVAAVEFACKKALKIDGPVLIVTDSFYVAESVNKELPYWQSNGFFNNKKKPLKHVSKWKSIADCIQLKPDIIIIHEKGHQPTASTFHTEGNNLADKLATQGSYVVNAGKRTADGSEFEKRTADGSEFESPKKKAKVE

SEQ ID NO: 7348 - protein, 2094 aa, synthetic construct
MPAAKRVKLDGGDKKYSIGLDIGTNSVGWAVITDEYKVPSKKFKVLGNTDRHSIKKNLIGALLFDSGETAEATRLKRTARRRYTRRKNRICYLQEIFSNEMAKVDDSFFHRLEESFLVEEDKKHERHPIFGNIVDEVAYHEKYPTIYHLRKKLVDSTDKADLRLIYLALAHMIKFRGHFLIEGDLNPDNSDVDKLFIQLVQTYNQLFEENPINASGVDAKAILSARLSKSRRLENLIAQLPGEKKNGLFGNLIALSLGLTPNFKSNFDLAEDAKLQLSKDTYDDDLDNLLAQIGDQYADLFLAAKNLSDAILLSDILRVNTEITKAPLSASMIKRYDEHHQDLTLLKALVRQQLPEKYKEIFFDQSKNGYAGYIDGGASQEEFYKFIKPILEKMDGTEELLVKLNREDLLRKQRTFDNGSIPHQIHLGELHAILRRQEDFYPFLKDNREKIEKILTFRIPYYVGPLARGNSRFAWMTRKSEETITPWNFEEVVDKGASAQSFIERMTNFDKNLPNEKVLPKHSLLYEYFTVYNELTKVKYVTEGMRKPAFLSGEQKKAIVDLLFKTNRKVTVKQLKEDYFKKIECFDSVEISGVEDRFNASLGTYHDLLKIIKDKDFLDNEENEDILEDIVLTLTLFEDREMIEERLKTYAHLFDDKVMKQLKRRRYTGWGRLSRKLINGIRDKQSGKTILDFLKSDGFANRNFMQLIHDDSLTFKEDIQKAQVSGQGDSLHEHIANLAGSPAIKKGILQTVKVVDELVKVMGRHKPENIVIEMARENQTTQKGQKNSRERMKRIEEGIKELGSQILKEHPVENTQLQNEKLYLYYLQNGRDMYVDQELDINRLSDYDVDHIVPQSFLKDDSIDNKVLTRSDKARGKSDNVPSEEVVKKMKNYWRQLLNAKLITQRKFDNLTKAERGGLSELDKAGFIKRQLVETRQITKHVAQILDSRMNTKYDENDKLIREVKVITLKSKLVSDFRKDFQFYKVREINNYHHAHDAYLNAVVGTALIKKYPKLESEFVYGDYKVYDVRKMIAKSEQEIGKATAKYFFYSNIMNFFKTEITLANGEIRKRPLIETNGETGEIVWDKGRDFATVRKVLSMPQVNIVKKTEVQTGGFSKESILPKRNSDKLIARKKDWDPKKYGGFDSPTVAYSVLVVAKVEKGKSKKLKSVKELLGITIMERSSFEKNPIDFLEAKGYKEVKKDLIIKLPKYSLFELENGRKRMLASAGELQKGNELALPSKYVNFLYLASHYEKLKGSPEDNEQKQLFVEQHKHYLDEIIEQISEFSKRVILADANLDKVLSAYNKHRDKPIREQAENIIHLFTLTNLGAPAAFKYFDTTIDRKRYTSTKEVLDATLIHQSITGLYETRIDLSQLGGDGGEAAAKGSSGGGGGVLNLEEEYRLHEKPVPSSIDPSWLQLFPTVWAERAGMGLANQVPPVVVELRSGASPVAVRQYPMSKEAREGIRPHIQRFLDLGVLVPCQSPWNTPLLPVKKPGTNDYRPVQDLREINKRVQDIHPTVPNPYNLLSSLPPSHTWYSVLDLKDAFFCLKLHPNSQPLFAFEWRDPEKGNTGQLTWTRLPQGFKNSPTLFDEALHRDLAPFRALNPQVVLLQYVDDLLVAAPTYRDCKEGTQKLLQELSKLGYRVSAKKAQLCQKEVTYLGYLLKEGKRWLTPARKATVMKIPPPTTPRQVREFLGTAGFCRLWIPGFASLAAPLYPLTKESIPFIWTEEHQKAFDRIKEALLSAPALALPDLTKPFTLYVDERAGVARGVLTQTLGPWRRPVAYLSKKLDPVASGWPTCLKAVAAVALLLKDADKLTLGQNVTVIASHSLESIVRQPPDRWMTNARMTHYQSLLLNERVSFAPPAVLNPATLLPVESEATPVHRCSEILAEETGTRRDLKDQPLPGVPAWYTDGSSFIAEGKRRAGAAIVDGKRTVWASSLPEGTSAQKAELVALTQALRLAEGKDINIYTDSRYAFATAHIHGAIYKQRGLLTSAGKDIKNKEEILALLEAIHLPKRVAIIHCPGHQKGNDPVATGNRRADEAAKQAALSTRVLAETTKPAGKRTADGSEFEKRTADGSEFESPKKKAKVE

SEQ ID NO: 7349 - protein, 2094 aa, synthetic construct
MPAAKRVKLDGGDKKYSIGLDIGTNSVGWAVITDEYKVPSKKFKVLGNTDRHSIKKNLIGALLFDSGETAEATRLKRTARRRYTRRKNRICYLQEIFSNEMAKVDDSFFHRLEESFLVEEDKKHERHPIFGNIVDEVAYHEKYPTIYHLRKKLVDSTDKADLRLIYLALAHMIKFRGHFLIEGDLNPDNSDVDKLFIQLVQTYNQLFEENPINASGVDAKAILSARLSKSRRLENLIAQLPGEKKNGLFGNLIALSLGLTPNFKSNFDLAEDAKLQLSKDTYDDDLDNLLAQIGDQYADLFLAAKNLSDAILLSDILRVNTEITKAPLSASMIKRYDEHHQDLTLLKALVRQQLPEKYKEIFFDQSKNGYAGYIDGGASQEEFYKFIKPILEKMDGTEELLVKLNREDLLRKQRTFDNGSIPHQIHLGELHAILRRQEDFYPFLKDNREKIEKILTFRIPYYVGPLARGNSRFAWMTRKSEETITPWNFEEVVDKGASAQSFIERMTNFDKNLPNEKVLPKHSLLYEYFTVYNELTKVKYVTEGMRKPAFLSGEQKKAIVDLLFKTNRKVTVKQLKEDYFKKIECFDSVEISGVEDRFNASLGTYHDLLKIIKDKDFLDNEENEDILEDIVLTLTLFEDREMIEERLKTYAHLFDDKVMKQLKRRRYTGWGRLSRKLINGIRDKQSGKTILDFLKSDGFANRNFMQLIHDDSLTFKEDIQKAQVSGQGDSLHEHIANLAGSPAIKKGILQTVKVVDELVKVMGRHKPENIVIEMARENQTTQKGQKNSRERMKRIEEGIKELGSQILKEHPVENTQLQNEKLYLYYLQNGRDMYVDQELDINRLSDYDVDHIVPQSFLKDDSIDNKVLTRSDKARGKSDNVPSEEVVKKMKNYWRQLLNAKLITQRKFDNLTKAERGGLSELDKAGFIKRQLVETRQITKHVAQILDSRMNTKYDENDKLIREVKVITLKSKLVSDFRKDFQFYKVREINNYHHAHDAYLNAVVGTALIKKYPKLESEFVYGDYKVYDVRKMIAKSEQEIGKATAKYFFYSNIMNFFKTEITLANGEIRKRPLIETNGETGEIVWDKGRDFATVRKVLSMPQVNIVKKTEVQTGGFSKESILPKRNSDKLIARKKDWDPKKYGGFDSPTVAYSVLVVAKVEKGKSKKLKSVKELLGITIMERSSFEKNPIDFLEAKGYKEVKKDLIIKLPKYSLFELENGRKRMLASAGELQKGNELALPSKYVNFLYLASHYEKLKGSPEDNEQKQLFVEQHKHYLDEIIEQISEFSKRVILADANLDKVLSAYNKHRDKPIREQAENIIHLFTLTNLGAPAAFKYFDTTIDRKRYTSTKEVLDATLIHQSITGLYETRIDLSQLGGDGGEAAAKGSSGGGGGVLNLEEEYRLHEKPVPSSIDPSWLQLFPTVWAERAGMGLANQVPPVVVELRSGASPVAVRQYPMSKEAREGIRPHIQRFLDLGVLVPCQSPWNTPLLPVKKPGTNDYRPVQDLREINKRVQDIHPTVPNPYNLLSSLPPSHTWYSVLDLKDAFFCLKLHPNSQPLFAFEWRDPEKGNTGQLTWTRLPQGFKNSPTLFNEALHRDLAPFRALNPQVVLLQYVDDLLVAAPTYRDCKEGTQKLLQELSKLGYRVSAKKAQLCQKEVTYLGYLLKEGKRWLTPARKATVMKIPPPTTPRQVREFLGTAGFCRLWIPGFASLAAPLYPLTKPSIPFIWTEEHQKAFDRIKEALLSAPALALPDLTKPFTLYVDERAGVARGVLTQTLGPWRRPVAYLSKKLDPVASGWPTCLKAVAAVALLLKDADKLTLGQNVTVIASHSLESIVRQPPDRWMTNARMTHYQSLLLNERVSFAPPAVLNPATLLPVESEATPVHRCSEILAEETGTRRDLKDQPLPGVPAWYTDGSSFIAEGKRRAGAAIVDGKRTVWASSLPEGTSAQKAELVALTQALRLAEGKDINIYTDSRYAFATAHIHGAIYKQRGWLTSAGKDIKNKEEILALLEAIHLPKRVAIIHCPGHQKGNDPVATGNRRADEAAKQAALSTRVLAETTKPAGKRTADGSEFEKRTADGSEFESPKKKAKVE

SEQ ID NO: 7350 - protein, 2096 aa, synthetic construct
MPAAKRVKLDGGDKKYSIGLDIGTNSVGWAVITDEYKVPSKKFKVLGNTDRHSIKKNLIGALLFDSGETAEATRLKRTARRRYTRRKNRICYLQEIFSNEMAKVDDSFFHRLEESFLVEEDKKHERHPIFGNIVDEVAYHEKYPTIYHLRKKLVDSTDKADLRLIYLALAHMIKFRGHFLIEGDLNPDNSDVDKLFIQLVQTYNQLFEENPINASGVDAKAILSARLSKSRRLENLIAQLPGEKKNGLFGNLIALSLGLTPNFKSNFDLAEDAKLQLSKDTYDDDLDNLLAQIGDQYADLFLAAKNLSDAILLSDILRVNTEITKAPLSASMIKRYDEHHQDLTLLKALVRQQLPEKYKEIFFDQSKNGYAGYIDGGASQEEFYKFIKPILEKMDGTEELLVKLNREDLLRKQRTFDNGSIPHQIHLGELHAILRRQEDFYPFLKDNREKIEKILTFRIPYYVGPLARGNSRFAWMTRKSEETITPWNFEEVVDKGASAQSFIERMTNFDKNLPNEKVLPKHSLLYEYFTVYNELTKVKYVTEGMRKPAFLSGEQKKAIVDLLFKTNRKVTVKQLKEDYFKKIECFDSVEISGVEDRFNASLGTYHDLLKIIKDKDFLDNEENEDILEDIVLTLTLFEDREMIEERLKTYAHLFDDKVMKQLKRRRYTGWGRLSRKLINGIRDKQSGKTILDFLKSDGFANRNFMQLIHDDSLTFKEDIQKAQVSGQGDSLHEHIANLAGSPAIKKGILQTVKVVDELVKVMGRHKPENIVIEMARENQTTQKGQKNSRERMKRIEEGIKELGSQILKEHPVENTQLQNEKLYLYYLQNGRDMYVDQELDINRLSDYDVDHIVPQSFLKDDSIDNKVLTRSDKARGKSDNVPSEEVVKKMKNYWRQLLNAKLITQRKFDNLTKAERGGLSELDKAGFIKRQLVETRQITKHVAQILDSRMNTKYDENDKLIREVKVITLKSKLVSDFRKDFQFYKVREINNYHHAHDAYLNAVVGTALIKKYPKLESEFVYGDYKVYDVRKMIAKSEQEIGKATAKYFFYSNIMNFFKTEITLANGEIRKRPLIETNGETGEIVWDKGRDFATVRKVLSMPQVNIVKKTEVQTGGFSKESILPKRNSDKLIARKKDWDPKKYGGFDSPTVAYSVLVVAKVEKGKSKKLKSVKELLGITIMERSSFEKNPIDFLEAKGYKEVKKDLIIKLPKYSLFELENGRKRMLASAGELQKGNELALPSKYVNFLYLASHYEKLKGSPEDNEQKQLFVEQHKHYLDEIIEQISEFSKRVILADANLDKVLSAYNKHRDKPIREQAENIIHLFTLTNLGAPAAFKYFDTTIDRKRYTSTKEVLDATLIHQSITGLYETRIDLSQLGGDGGEAAAKGSSGGGGGTLNIEDEYRLHETSKEPDVPLGSTWLSDFPQAWAETGGMGLAVRQAPLIIPLKATSTPVSIKQYPMSQEARLGIKPHIQRLLDQGILVPCQSPWNTPLLPVKKPGTNDYRPVQDLREVNKRVEDIHPTVPNPYNLLSGLPPSHQWYTVLDLKDAFFCLRLHPTSQPLFAFEWRDPEMGISGQLTWTRLPQGFKNSPTLFNEALHRDLADFRIQHPDLILLQYVDDLLLAATSEQDCQRGTRALLQTLGNLGYRASAKKAQICQKQVKYLGYLLKEGQRWLTEARKETVMGQPTPKTPRQLREFLGTAGFCRLWIPGFAEMAAPLYPLTKPGTLFNWGPDQQKAYQEIKQALLTAPALGLPDLTKPFELFVDEKQGYAKGVLTQKLGPWRRPVAYLSKKLDPVAAGWPPCLRMVAAIAVLTKDAGKLTMGQPLVILAPHAVEALVKQPPDRWLSNARMTHYQAMLLDTDRVQFGPVVALNPATLLPLPEKEAPHDCLEILAETHGTRPDLTDQPIPDADYTWYTDGSSFLQEGQRRAGAAVTTETEVIWARALPAGTSAQRAELIALTQALKMAEGKKLNVYTDSRYAFATAHVHGEIYRRRGWLTSEGREIKNKNEILALLKALFLPKRLSIIHCPGHQKGNSAEARGNRMADQAAREAAMKAVLETSTLLAGKRTADGSEFEKRTADGSEFESPKKKAKVE

SEQ ID NO: 7351 - protein, 2096 aa, synthetic construct
MPAAKRVKLDGGDKKYSIGLDIGTNSVGWAVITDEYKVPSKKFKVLGNTDRHSIKKNLIGALLFDSGETAEATRLKRTARRRYTRRKNRICYLQEIFSNEMAKVDDSFFHRLEESFLVEEDKKHERHPIFGNIVDEVAYHEKYPTIYHLRKKLVDSTDKADLRLIYLALAHMIKFRGHFLIEGDLNPDNSDVDKLFIQLVQTYNQLFEENPINASGVDAKAILSARLSKSRRLENLIAQLPGEKKNGLFGNLIALSLGLTPNFKSNFDLAEDAKLQLSKDTYDDDLDNLLAQIGDQYADLFLAAKNLSDAILLSDILRVNTEITKAPLSASMIKRYDEHHQDLTLLKALVRQQLPEKYKEIFFDQSKNGYAGYIDGGASQEEFYKFIKPILEKMDGTEELLVKLNREDLLRKQRTFDNGSIPHQIHLGELHAILRRQEDFYPFLKDNREKIEKILTFRIPYYVGPLARGNSRFAWMTRKSEETITPWNFEEVVDKGASAQSFIERMTNFDKNLPNEKVLPKHSLLYEYFTVYNELTKVKYVTEGMRKPAFLSGEQKKAIVDLLFKTNRKVTVKQLKEDYFKKIECFDSVEISGVEDRFNASLGTYHDLLKIIKDKDFLDNEENEDILEDIVLTLTLFEDREMIEERLKTYAHLFDDKVMKQLKRRRYTGWGRLSRKLINGIRDKQSGKTILDFLKSDGFANRNFMQLIHDDSLTFKEDIQKAQVSGQGDSLHEHIANLAGSPAIKKGILQTVKVVDELVKVMGRHKPENIVIEMARENQTTQKGQKNSRERMKRIEEGIKELGSQILKEHPVENTQLQNEKLYLYYLQNGRDMYVDQELDINRLSDYDVDHIVPQSFLKDDSIDNKVLTRSDKARGKSDNVPSEEVVKKMKNYWRQLLNAKLITQRKFDNLTKAERGGLSELDKAGFIKRQLVETRQITKHVAQILDSRMNTKYDENDKLIREVKVITLKSKLVSDFRKDFQFYKVREINNYHHAHDAYLNAVVGTALIKKYPKLESEFVYGDYKVYDVRKMIAKSEQEIGKATAKYFFYSNIMNFFKTEITLANGEIRKRPLIETNGETGEIVWDKGRDFATVRKVLSMPQVNIVKKTEVQTGGFSKESILPKRNSDKLIARKKDWDPKKYGGFDSPTVAYSVLVVAKVEKGKSKKLKSVKELLGITIMERSSFEKNPIDFLEAKGYKEVKKDLIIKLPKYSLFELENGRKRMLASAGELQKGNELALPSKYVNFLYLASHYEKLKGSPEDNEQKQLFVEQHKHYLDEIIEQISEFSKRVILADANLDKVLSAYNKHRDKPIREQAENIIHLFTLTNLGAPAAFKYFDTTIDRKRYTSTKEVLDATLIHQSITGLYETRIDLSQLGGDGGGGGGSSPAPGGTAPLEEEYRLFLEAPIQNVTLLEQWKREIPKVWAEINPPGLASTQAPIHVQLLSTALPVRVRQYPITLEAKRSLRETIRKFRAAGILRPVHSPWNTPLLPVRKSGTSEYRMVQDLREVNKRVETIHPTVPNPYTLLSLLPPDRIWYSVLDLKDAFFCIPLAPESQLIFAFEWADAEEGESGQLTWTRLPQGFKNSPTLFNEALNRDLQGFRLDHPSVSLLQYVDDLLIAADTQAACLSATRDLLMTLAELGYRVSGKKAQLCQEEVTYLGFKIHKGSRSLSNSRTQAILQIPVPKTKRQVREFLGKIGYCRLFIPGFAELAQPLYAATRPGNDPLVWGEKEEEAFQSLKLALTQPPALALPSLDKPFQLFVEETSGAAKGVLTQALGPWKRPVAYLSKRLDPVAAGWPRCLRAIAAAALLTREASKLTFGQDIEITSSHNLESLLRSPPDKWLTNARITQYQVLLLDPPRVRFKQTAALNPATLLPETDDTLPIHHCLDTLDSLTSTRPDLTDQPLAQAEATLFTDGSSYIRDGKRYAGAAVVTLDSVIWAEPLPIGTSAQKAELIALTKALEWSKDKSVNIYTDSRYAFATLHVHGMIYRERGWLTAGGKAIKNAPEILALLTAVWLPKRVAVMHCKGHQKDDAPTSTGNRRADEVAREVAIRPLSTQATISAGKRTADGSEFEKRTADGSEFESPKKKAKVE

SEQ ID NO: 7352 - protein, 2093 aa, synthetic construct
MPAAKRVKLDGGDKKYSIGLDIGTNSVGWAVITDEYKVPSKKFKVLGNTDRHSIKKNLIGALLFDSGETAEATRLKRTARRRYTRRKNRICYLQEIFSNEMAKVDDSFFHRLEESFLVEEDKKHERHPIFGNIVDEVAYHEKYPTIYHLRKKLVDSTDKADLRLIYLALAHMIKFRGHFLIEGDLNPDNSDVDKLFIQLVQTYNQLFEENPINASGVDAKAILSARLSKSRRLENLIAQLPGEKKNGLFGNLIALSLGLTPNFKSNFDLAEDAKLQLSKDTYDDDLDNLLAQIGDQYADLFLAAKNLSDAILLSDILRVNTEITKAPLSASMIKRYDEHHQDLTLLKALVRQQLPEKYKEIFFDQSKNGYAGYIDGGASQEEFYKFIKPILEKMDGTEELLVKLNREDLLRKQRTFDNGSIPHQIHLGELHAILRRQEDFYPFLKDNREKIEKILTFRIPYYVGPLARGNSRFAWMTRKSEETITPWNFEEVVDKGASAQSFIERMTNFDKNLPNEKVLPKHSLLYEYFTVYNELTKVKYVTEGMRKPAFLSGEQKKAIVDLLFKTNRKVTVKQLKEDYFKKIECFDSVEISGVEDRFNASLGTYHDLLKIIKDKDFLDNEENEDILEDIVLTLTLFEDREMIEERLKTYAHLFDDKVMKQLKRRRYTGWGRLSRKLINGIRDKQSGKTILDFLKSDGFANRNFMQLIHDDSLTFKEDIQKAQVSGQGDSLHEHIANLAGSPAIKKGILQTVKVVDELVKVMGRHKPENIVIEMARENQTTQKGQKNSRERMKRIEEGIKELGSQILKEHPVENTQLQNEKLYLYYLQNGRDMYVDQELDINRLSDYDVDHIVPQSFLKDDSIDNKVLTRSDKARGKSDNVPSEEVVKKMKNYWRQLLNAKLITQRKFDNLTKAERGGLSELDKAGFIKRQLVETRQITKHVAQILDSRMNTKYDENDKLIREVKVITLKSKLVSDFRKDFQFYKVREINNYHHAHDAYLNAVVGTALIKKYPKLESEFVYGDYKVYDVRKMIAKSEQEIGKATAKYFFYSNIMNFFKTEITLANGEIRKRPLIETNGETGEIVWDKGRDFATVRKVLSMPQVNIVKKTEVQTGGFSKESILPKRNSDKLIARKKDWDPKKYGGFDSPTVAYSVLVVAKVEKGKSKKLKSVKELLGITIMERSSFEKNPIDFLEAKGYKEVKKDLIIKLPKYSLFELENGRKRMLASAGELQKGNELALPSKYVNFLYLASHYEKLKGSPEDNEQKQLFVEQHKHYLDEIIEQISEFSKRVILADANLDKVLSAYNKHRDKPIREQAENIIHLFTLTNLGAPAAFKYFDTTIDRKRYTSTKEVLDATLIHQSITGLYETRIDLSQLGGDGGGGGGSSPAPGGTLQLEEEYRLFEPESTQKQEMDIWLKNFPQAWAETGGMGTAHCQAPVLIQLKATATPISIRQYPMPHEAYQGIKPHIRRMLDQGILKPCQSPWNTPLLPVKKPGTEDYRPVQDLREVNKRVEDIHPTVPNPYNLLSTLPPSHPWYTVLDLKDAFFCLRLHSESQLLFAFEWRDPEIGLSGQLTWTRLPQGFKNSPTLFNEALHSDLADFRVRYPALVLLQYVDDLLLAAATRTECLEGTKALLETLGNKGYRASAKKAQICLQEVTYLGYSLKDGQRWLTKARKEAILSIPVPKNSRQVREFLGKAGYCRLFIPGFAELAAPLYPLTRPGTLFQWGTEQQLAFEDIKKALLSSPALGLPDITKPFELFIDENSGFAKGVLVQKLGPWKRPVAYLSKKLDTVASGWPPCLRMVAAIAILVKDAGKLTLGQPLTILTSHPVEALVRQPPNKWLSNARMTHYQAMLLDAERVHFGPTVSLNPATLLPLPSGGNHHDCLQILAETHGTRPDLTDQPLPDADLTWYTDGSSFIRNGEREAGAAVTTESEVIWAAPLPPGTSAQRAELIALTQALKMAEGKKLTVYTDSRYAFATTHVHGEIYRRRGWLTSEGKEIKNKNEILALLEALFLPKRLSIIHCPGHQKGDSPQAKGNRLADDTAKKAATETHSSLTVLPAGKRTADGSEFEKRTADGSEFESPKKKAKVE

SEQ ID NO: 7353 - protein, 2216 aa, synthetic construct
MPAAKRVKLDGGDKKYSIGLDIGTNSVGWAVITDEYKVPSKKFKVLGNTDRHSIKKNLIGALLFDSGETAEATRLKRTARRRYTRRKNRICYLQEIFSNEMAKVDDSFFHRLEESFLVEEDKKHERHPIFGNIVDEVAYHEKYPTIYHLRKKLVDSTDKADLRLIYLALAHMIKFRGHFLIEGDLNPDNSDVDKLFIQLVQTYNQLFEENPINASGVDAKAILSARLSKSRRLENLIAQLPGEKKNGLFGNLIALSLGLTPNFKSNFDLAEDAKLQLSKDTYDDDLDNLLAQIGDQYADLFLAAKNLSDAILLSDILRVNTEITKAPLSASMIKRYDEHHQDLTLLKALVRQQLPEKYKEIFFDQSKNGYAGYIDGGASQEEFYKFIKPILEKMDGTEELLVKLNREDLLRKQRTFDNGSIPHQIHLGELHAILRRQEDFYPFLKDNREKIEKILTFRIPYYVGPLARGNSRFAWMTRKSEETITPWNFEEVVDKGASAQSFIERMTNFDKNLPNEKVLPKHSLLYEYFTVYNELTKVKYVTEGMRKPAFLSGEQKKAIVDLLFKTNRKVTVKQLKEDYFKKIECFDSVEISGVEDRFNASLGTYHDLLKIIKDKDFLDNEENEDILEDIVLTLTLFEDREMIEERLKTYAHLFDDKVMKQLKRRRYTGWGRLSRKLINGIRDKQSGKTILDFLKSDGFANRNFMQLIHDDSLTFKEDIQKAQVSGQGDSLHEHIANLAGSPAIKKGILQTVKVVDELVKVMGRHKPENIVIEMARENQTTQKGQKNSRERMKRIEEGIKELGSQILKEHPVENTQLQNEKLYLYYLQNGRDMYVDQELDINRLSDYDVDHIVPQSFLKDDSIDNKVLTRSDKARGKSDNVPSEEVVKKMKNYWRQLLNAKLITQRKFDNLTKAERGGLSELDKAGFIKRQLVETRQITKHVAQILDSRMNTKYDENDKLIREVKVITLKSKLVSDFRKDFQFYKVREINNYHHAHDAYLNAVVGTALIKKYPKLESEFVYGDYKVYDVRKMIAKSEQEIGKATAKYFFYSNIMNFFKTEITLANGEIRKRPLIETNGETGEIVWDKGRDFATVRKVLSMPQVNIVKKTEVQTGGFSKESILPKRNSDKLIARKKDWDPKKYGGFDSPTVAYSVLVVAKVEKGKSKKLKSVKELLGITIMERSSFEKNPIDFLEAKGYKEVKKDLIIKLPKYSLFELENGRKRMLASAGELQKGNELALPSKYVNFLYLASHYEKLKGSPEDNEQKQLFVEQHKHYLDEIIEQISEFSKRVILADANLDKVLSAYNKHRDKPIREQAENIIHLFTLTNLGAPAAFKYFDTTIDRKRYTSTKEVLDATLIHQSITGLYETRIDLSQLGGDGGGGGGSSPAPGGTLGDQGSRGSDPLPEPRVTLTVEGIPTEFLVNTGAEHSVLTKPMGKMGSKRTVVAGATGSKVYPWTTKRLLKIGQKQVTHSFLVIPECPAPLLGRDLLTKLKAQIQFSTEGPQVTWEDRPAMCLVLNLEEEYRLHEKPVPPSIDPSWLQLFPMVWAEKAGMGLANQVPPVVVELKSDASPVAVRQYPMSKEAREGIRPHIQRFLDLGILVPCQSPWNTPLLPVKKPGTNDYRPVQDLREVNKRVQDIHPTVPNPYNLLSSLPPSHTWYSVLDLKDAFFCLKLHPNSQPLFAFEWRDPEKGNTGQLTWTRLPQGFKNSPTLFDEALHRDLASFRALNPQVVMLQYVDDLLVAAPTYRDCKEGTRRLLQELSKLGYRVSAKKAQLCREEVTYLGYLLKGGKRWLTPARKATVMKIPTPTTPRQVREFLGTAGFCRLWIPGFASLAAPLYPLTREKVPFTWTEAHQEAFGRIKEALLSAPALALPDLTKPFALYVDEKEGVARGVLTQTLGPWRRPVAYLSKKLDPVASGWPTCLKAIAAVALLLKDADKLTLGQNVLVIAPHNLESIVRQPPDRWMTNARMTHYQSLLLNERVSFAPPAILNPATLLPVESDDTPIHICSEILAEETGTRPDLRDQPLPGVPAWYTDGSSFIMDGRRQAGAAIVDNKRTVWASNLPEGTSAQKAELIALTQALRLAEGKSINIYTDSRYAFATAHVHGAIYKQRGLLTSAGKDIKNKEEILALLEAIHLPKRVAIIHCPGHQRGTDPVATGNRKADEAAKQAAQSTRILTETTKNAGKRTADGSEFEKRTADGSEFESPKKKAKVE

SEQ ID NO: 7354 - protein, 2125 aa, synthetic construct
MPAAKRVKLDGGDKKYSIGLDIGTNSVGWAVITDEYKVPSKKFKVLGNTDRHSIKKNLIGALLFDSGETAEATRLKRTARRRYTRRKNRICYLQEIFSNEMAKVDDSFFHRLEESFLVEEDKKHERHPIFGNIVDEVAYHEKYPTIYHLRKKLVDSTDKADLRLIYLALAHMIKFRGHFLIEGDLNPDNSDVDKLFIQLVQTYNQLFEENPINASGVDAKAILSARLSKSRRLENLIAQLPGEKKNGLFGNLIALSLGLTPNFKSNFDLAEDAKLQLSKDTYDDDLDNLLAQIGDQYADLFLAAKNLSDAILLSDILRVNTEITKAPLSASMIKRYDEHHQDLTLLKALVRQQLPEKYKEIFFDQSKNGYAGYIDGGASQEEFYKFIKPILEKMDGTEELLVKLNREDLLRKQRTFDNGSIPHQIHLGELHAILRRQEDFYPFLKDNREKIEKILTFRIPYYVGPLARGNSRFAWMTRKSEETITPWNFEEVVDKGASAQSFIERMTNFDKNLPNEKVLPKHSLLYEYFTVYNELTKVKYVTEGMRKPAFLSGEQKKAIVDLLFKTNRKVTVKQLKEDYFKKIECFDSVEISGVEDRFNASLGTYHDLLKIIKDKDFLDNEENEDILEDIVLTLTLFEDREMIEERLKTYAHLFDDKVMKQLKRRRYTGWGRLSRKLINGIRDKQSGKTILDFLKSDGFANRNFMQLIHDDSLTFKEDIQKAQVSGQGDSLHEHIANLAGSPAIKKGILQTVKVVDELVKVMGRHKPENIVIEMARENQTTQKGQKNSRERMKRIEEGIKELGSQILKEHPVENTQLQNEKLYLYYLQNGRDMYVDQELDINRLSDYDVDHIVPQSFLKDDSIDNKVLTRSDKARGKSDNVPSEEVVKKMKNYWRQLLNAKLITQRKFDNLTKAERGGLSELDKAGFIKRQLVETRQITKHVAQILDSRMNTKYDENDKLIREVKVITLKSKLVSDFRKDFQFYKVREINNYHHAHDAYLNAVVGTALIKKYPKLESEFVYGDYKVYDVRKMIAKSEQEIGKATAKYFFYSNIMNFFKTEITLANGEIRKRPLIETNGETGEIVWDKGRDFATVRKVLSMPQVNIVKKTEVQTGGFSKESILPKRNSDKLIARKKDWDPKKYGGFDSPTVAYSVLVVAKVEKGKSKKLKSVKELLGITIMERSSFEKNPIDFLEAKGYKEVKKDLIIKLPKYSLFELENGRKRMLASAGELQKGNELALPSKYVNFLYLASHYEKLKGSPEDNEQKQLFVEQHKHYLDEIIEQISEFSKRVILADANLDKVLSAYNKHRDKPIREQAENIIHLFTLTNLGAPAAFKYFDTTIDRKRYTSTKEVLDATLIHQSITGLYETRIDLSQLGGDGGGGGGSSPAPGGLLGRDLLTKLKAQIQFSTEGPQVTWEDRPAMCLVLNLEEEYRLHEKPVPPSIDPSWLQLFPMVWAEKAGMGLANQVPPVVVELKSDASPVAVRQYPMSKEAREGIRPHIQRFLDLGILVPCQSPWNTPLLPVKKPGTNDYRPVQDLREVNKRVQDIHPTVPNPYNLLSSLPPSHTWYSVLDLKDAFFCLKLHPNSQPLFAFEWRDPEKGNTGQLTWTRLPQGFKNSPTLFNEALHRDLASFRALNPQVVMLQYVDDLLVAAPTYRDCKEGTRRLLQELSKLGYRVSAKKAQLCREEVTYLGYLLKGGKRWLTPARKATVMKIPTPTTPRQVREFLGTAGFCRLWIPGFASLAAPLYPLTRPKVPFTWTEAHQEAFGRIKEALLSAPALALPDLTKPFALYVDEKEGVARGVLTQTLGPWRRPVAYLSKKLDPVASGWPTCLKAIAAVALLLKDADKLTLGQNVLVIAPHNLESIVRQPPDRWMTNARMTHYQSLLLNERVSFAPPAILNPATLLPVESDDTPIHICSEILAEETGTRPDLRDQPLPGVPAWYTDGSSFIMDGRRQAGAAIVDNKRTVWASNLPEGTSAQKAELIALTQALRLAEGKSINIYTDSRYAFATAHVHGAIYKQRGWLTSAGKDIKNKEEILALLEAIHLPKRVAIIHCPGHQRGTDPVATGNRKADEAAKQAAQSTRILTETTKNAGKRTADGSEFEKRTADGSEFESPKKKAKVE

SEQ ID NO: 7355 - protein, 2216 aa, synthetic construct
MPAAKRVKLDGGDKKYSIGLDIGTNSVGWAVITDEYKVPSKKFKVLGNTDRHSIKKNLIGALLFDSGETAEATRLKRTARRRYTRRKNRICYLQEIFSNEMAKVDDSFFHRLEESFLVEEDKKHERHPIFGNIVDEVAYHEKYPTIYHLRKKLVDSTDKADLRLIYLALAHMIKFRGHFLIEGDLNPDNSDVDKLFIQLVQTYNQLFEENPINASGVDAKAILSARLSKSRRLENLIAQLPGEKKNGLFGNLIALSLGLTPNFKSNFDLAEDAKLQLSKDTYDDDLDNLLAQIGDQYADLFLAAKNLSDAILLSDILRVNTEITKAPLSASMIKRYDEHHQDLTLLKALVRQQLPEKYKEIFFDQSKNGYAGYIDGGASQEEFYKFIKPILEKMDGTEELLVKLNREDLLRKQRTFDNGSIPHQIHLGELHAILRRQEDFYPFLKDNREKIEKILTFRIPYYVGPLARGNSRFAWMTRKSEETITPWNFEEVVDKGASAQSFIERMTNFDKNLPNEKVLPKHSLLYEYFTVYNELTKVKYVTEGMRKPAFLSGEQKKAIVDLLFKTNRKVTVKQLKEDYFKKIECFDSVEISGVEDRFNASLGTYHDLLKIIKDKDFLDNEENEDILEDIVLTLTLFEDREMIEERLKTYAHLFDDKVMKQLKRRRYTGWGRLSRKLINGIRDKQSGKTILDFLKSDGFANRNFMQLIHDDSLTFKEDIQKAQVSGQGDSLHEHIANLAGSPAIKKGILQTVKVVDELVKVMGRHKPENIVIEMARENQTTQKGQKNSRERMKRIEEGIKELGSQILKEHPVENTQLQNEKLYLYYLQNGRDMYVDQELDINRLSDYDVDHIVPQSFLKDDSIDNKVLTRSDKARGKSDNVPSEEVVKKMKNYWRQLLNAKLITQRKFDNLTKAERGGLSELDKAGFIKRQLVETRQITKHVAQILDSRMNTKYDENDKLIREVKVITLKSKLVSDFRKDFQFYKVREINNYHHAHDAYLNAVVGTALIKKYPKLESEFVYGDYKVYDVRKMIAKSEQEIGKATAKYFFYSNIMNFFKTEITLANGEIRKRPLIETNGETGEIVWDKGRDFATVRKVLSMPQVNIVKKTEVQTGGFSKESILPKRNSDKLIARKKDWDPKKYGGFDSPTVAYSVLVVAKVEKGKSKKLKSVKELLGITIMERSSFEKNPIDFLEAKGYKEVKKDLIIKLPKYSLFELENGRKRMLASAGELQKGNELALPSKYVNFLYLASHYEKLKGSPEDNEQKQLFVEQHKHYLDEIIEQISEFSKRVILADANLDKVLSAYNKHRDKPIREQAENIIHLFTLTNLGAPAAFKYFDTTIDRKRYTSTKEVLDATLIHQSITGLYETRIDLSQLGGDGGGGGGSSPAPGGTLGDQGSRGSDPLPEPRVTLTVEGIPTEFLVNTGAEHSVLTKPMGKMGSKRTVVAGATGSKVYPWTTKRLLKIGQKQVTHSFLVIPECPAPLLGRDLLTKLKAQIQFSTEGPQVTWEDRPAMCLVLNLEEEYRLHEKPVPPSIDPSWLQLFPMVWAEKAGMGLANQVPPVVVELKSDASPVAVRQYPMSKEAREGIRPHIQRFLDLGILVPCQSPWNTPLLPVKKPGTNDYRPVQDLREVNKRVQDIHPTVPNPYNLLSSLPPSHTWYSVLDLKDAFFCLKLHPNSQPLFAFEWRDPEKGNTGQLTWTRLPQGFKNSPTLFNEALHRDLASFRALNPQVVMLQYVDDLLVAAPTYRDCKEGTRRLLQELSKLGYRVSAKKAQLCREEVTYLGYLLKGGKRWLTPARKATVMKIPTPTTPRQVREFLGTAGFCRLWIPGFASLAAPLYPLTRPKVPFTWTEAHQEAFGRIKEALLSAPALALPDLTKPFALYVDEKEGVARGVLTQTLGPWRRPVAYLSKKLDPVASGWPTCLKAIAAVALLLKDADKLTLGQNVLVIAPHNLESIVRQPPDRWMTNARMTHYQSLLLNERVSFAPPAILNPATLLPVESDDTPIHICSEILAEETGTRPDLRDQPLPGVPAWYTDGSSFIMDGRRQAGAAIVDNKRTVWASNLPEGTSAQKAELIALTQALRLAEGKSINIYTDSRYAFATAHVHGAIYKQRGWLTSAGKDIKNKEEILALLEAIHLPKRVAIIHCPGHQRGTDPVATGNRKADEAAKQAAQSTRILTETTKNAGKRTADGSEFEKRTADGSEFESPKKKAKVE

SEQ ID NO: 7356 - protein, 2094 aa, synthetic construct
MPAAKRVKLDGGDKKYSIGLDIGTNSVGWAVITDEYKVPSKKFKVLGNTDRHSIKKNLIGALLFDSGETAEATRLKRTARRRYTRRKNRICYLQEIFSNEMAKVDDSFFHRLEESFLVEEDKKHERHPIFGNIVDEVAYHEKYPTIYHLRKKLVDSTDKADLRLIYLALAHMIKFRGHFLIEGDLNPDNSDVDKLFIQLVQTYNQLFEENPINASGVDAKAILSARLSKSRRLENLIAQLPGEKKNGLFGNLIALSLGLTPNFKSNFDLAEDAKLQLSKDTYDDDLDNLLAQIGDQYADLFLAAKNLSDAILLSDILRVNTEITKAPLSASMIKRYDEHHQDLTLLKALVRQQLPEKYKEIFFDQSKNGYAGYIDGGASQEEFYKFIKPILEKMDGTEELLVKLNREDLLRKQRTFDNGSIPHQIHLGELHAILRRQEDFYPFLKDNREKIEKILTFRIPYYVGPLARGNSRFAWMTRKSEETITPWNFEEVVDKGASAQSFIERMTNFDKNLPNEKVLPKHSLLYEYFTVYNELTKVKYVTEGMRKPAFLSGEQKKAIVDLLFKTNRKVTVKQLKEDYFKKIECFDSVEISGVEDRFNASLGTYHDLLKIIKDKDFLDNEENEDILEDIVLTLTLFEDREMIEERLKTYAHLFDDKVMKQLKRRRYTGWGRLSRKLINGIRDKQSGKTILDFLKSDGFANRNFMQLIHDDSLTFKEDIQKAQVSGQGDSLHEHIANLAGSPAIKKGILQTVKVVDELVKVMGRHKPENIVIEMARENQTTQKGQKNSRERMKRIEEGIKELGSQILKEHPVENTQLQNEKLYLYYLQNGRDMYVDQELDINRLSDYDVDHIVPQSFLKDDSIDNKVLTRSDKARGKSDNVPSEEVVKKMKNYWRQLLNAKLITQRKFDNLTKAERGGLSELDKAGFIKRQLVETRQITKHVAQILDSRMNTKYDENDKLIREVKVITLKSKLVSDFRKDFQFYKVREINNYHHAHDAYLNAVVGTALIKKYPKLESEFVYGDYKVYDVRKMIAKSEQEIGKATAKYFFYSNIMNFFKTEITLANGEIRKRPLIETNGETGEIVWDKGRDFATVRKVLSMPQVNIVKKTEVQTGGFSKESILPKRNSDKLIARKKDWDPKKYGGFDSPTVAYSVLVVAKVEKGKSKKLKSVKELLGITIMERSSFEKNPIDFLEAKGYKEVKKDLIIKLPKYSLFELENGRKRMLASAGELQKGNELALPSKYVNFLYLASHYEKLKGSPEDNEQKQLFVEQHKHYLDEIIEQISEFSKRVILADANLDKVLSAYNKHRDKPIREQAENIIHLFTLTNLGAPAAFKYFDTTIDRKRYTSTKEVLDATLIHQSITGLYETRIDLSQLGGDGGGGGGSSPAPGGTLNLEDEYRLYETSAEPEVSPGSTWLSDFPQAWAETGGMGLAVRQAPLIIPLKATSTPVSIKQYPMSQEAKLGIKPHIQRLLDQGILVPCQSPWNTPLLPVKKPGTNDYRPVQDLREVNKRVEDIHPTVPNPYNLLSGLPPSHRWYTVLDLKDAFFCLRLHPTSQPLFAFEWRDPGMGISGQLTWTRLPQGFKNSPTLFNEALHRDLADFRIQHPDLILLQYVDDILLAATSELDCQQGTRALLLTLGNLGYRASAKKAQLCQKQVKYLGYLLKEGQRWLTEARKETVMGQPTPKTPRQLREFLGTAGFCRLWIPGFAEMAAPLYPLTKPGTLFNWGPDQQKAYQEIKQALLTAPALGLPDLTKPFELFVDEKQGYAKGVLTQKLGPWRRPVAYLSKKLDPVAAGWPPCLRMVAAIAVLRKDAGKLTMGQPLVILAPHAVEALVKQPPDRWLSNARMTHYQAMLLDTDRVQFGPVVALNPATLLPLPEEGAPHDCLEILAETHGTRPDLTDQPIPDADHTWYTDGSSFLQEGQRKAGAAVTTETEVIWARALPAGTSAQRAELIALTQALKMAEGKRLNVYTDSRYAFATAHIHGEIYRRRGWLTSEGREIKNKSEILALLKALFLPKRLSIIHCLGHQKGDSAEARGNRLADQAAREAAIKTPPDTSTLLAGKRTADGSEFEKRTADGSEFESPKKKAKVE

SEQ ID NO: 7357 - protein, 2094 aa, synthetic construct
MPAAKRVKLDGGDKKYSIGLDIGTNSVGWAVITDEYKVPSKKFKVLGNTDRHSIKKNLIGALLFDSGETAEATRLKRTARRRYTRRKNRICYLQEIFSNEMAKVDDSFFHRLEESFLVEEDKKHERHPIFGNIVDEVAYHEKYPTIYHLRKKLVDSTDKADLRLIYLALAHMIKFRGHFLIEGDLNPDNSDVDKLFIQLVQTYNQLFEENPINASGVDAKAILSARLSKSRRLENLIAQLPGEKKNGLFGNLIALSLGLTPNFKSNFDLAEDAKLQLSKDTYDDDLDNLLAQIGDQYADLFLAAKNLSDAILLSDILRVNTEITKAPLSASMIKRYDEHHQDLTLLKALVRQQLPEKYKEIFFDQSKNGYAGYIDGGASQEEFYKFIKPILEKMDGTEELLVKLNREDLLRKQRTFDNGSIPHQIHLGELHAILRRQEDFYPFLKDNREKIEKILTFRIPYYVGPLARGNSRFAWMTRKSEETITPWNFEEVVDKGASAQSFIERMTNFDKNLPNEKVLPKHSLLYEYFTVYNELTKVKYVTEGMRKPAFLSGEQKKAIVDLLFKTNRKVTVKQLKEDYFKKIECFDSVEISGVEDRFNASLGTYHDLLKIIKDKDFLDNEENEDILEDIVLTLTLFEDREMIEERLKTYAHLFDDKVMKQLKRRRYTGWGRLSRKLINGIRDKQSGKTILDFLKSDGFANRNFMQLIHDDSLTFKEDIQKAQVSGQGDSLHEHIANLAGSPAIKKGILQTVKVVDELVKVMGRHKPENIVIEMARENQTTQKGQKNSRERMKRIEEGIKELGSQILKEHPVENTQLQNEKLYLYYLQNGRDMYVDQELDINRLSDYDVDHIVPQSFLKDDSIDNKVLTRSDKARGKSDNVPSEEVVKKMKNYWRQLLNAKLITQRKFDNLTKAERGGLSELDKAGFIKRQLVETRQITKHVAQILDSRMNTKYDENDKLIREVKVITLKSKLVSDFRKDFQFYKVREINNYHHAHDAYLNAVVGTALIKKYPKLESEFVYGDYKVYDVRKMIAKSEQEIGKATAKYFFYSNIMNFFKTEITLANGEIRKRPLIETNGETGEIVWDKGRDFATVRKVLSMPQVNIVKKTEVQTGGFSKESILPKRNSDKLIARKKDWDPKKYGGFDSPTVAYSVLVVAKVEKGKSKKLKSVKELLGITIMERSSFEKNPIDFLEAKGYKEVKKDLIIKLPKYSLFELENGRKRMLASAGELQKGNELALPSKYVNFLYLASHYEKLKGSPEDNEQKQLFVEQHKHYLDEIIEQISEFSKRVILADANLDKVLSAYNKHRDKPIREQAENIIHLFTLTNLGAPAAFKYFDTTIDRKRYTSTKEVLDATLIHQSITGLYETRIDLSQLGGDGGGGGGSSPAPGGLGIEDEYRLHETSTEPDVSLGSTWLSDFPQAWAETGGMGLAVRQAPLIIPLKATSTPVSIQQYPMSHEARLGIKPHIQRLLDQGILVPCQSPWNTPLLPVKKPGTNDYRPVQDLREVNKRVEDIHPTVPNPYNLLSGLPPSHQWYTVLDLKDAFFCLRLHPTSQPLFAFEWRDPGMGISGQLTWTRLPQGFKNSPTLFNEALHRDLADFRIQHPDLILLQYVDDILLAATSELDCQQGTRALLQTLGDLGYRASAKKAQICQKQVKYLGYLLREGQRWLTEARKETVMGQPVPKTPRQLREFLGKAGFCRLFIPGFAEMAAPLYPLTKPGTLFSWGPDQQKAYQEIKQALLTAPALGLPDLTKPFELFVDEKQGYAKGVLTQKLGPWRRPVAYLSKKLDPVAAGWPPCLRMVAAIAVLTKDAGKLTMGQPLVILAPHAVEALVKQPPDRWLSNARMTHYQAMLLDTDRVQFGPVVALNPATLLPLPEEGAPHDCLEILAETHGTRPDLTDQPIPDADHTWYTDGSSFLQEGQRKAGAAVTTETEVIWAGALPAGTSAQRAELIALTQALKMAEGKRLNVYTDSRYAFATAHIHGEIYRRRGWLTSEGREIKNKSEILALLKALFLPKRLSIIHCLGHQKGDSAEARGNRLADQAAREAAIKTPPDTSTLLIAGKRTADGSEFEKRTADGSEFESPKKKAKVE

SEQ ID NO: 7358 - protein, 2094 aa, synthetic construct; identical to SEQ ID NO: 7357

SEQ ID NO: 7359 - protein, 2094 aa, synthetic construct
MPAAKRVKLDGGDKKYSIGLDIGTNSVGWAVITDEYKVPSKKFKVLGNTDRHSIKKNLIGALLFDSGETAEATRLKRTARRRYTRRKNRICYLQEIFSNEMAKVDDSFFHRLEESFLVEEDKKHERHPIFGNIVDEVAYHEKYPTIYHLRKKLVDSTDKADLRLIYLALAHMIKFRGHFLIEGDLNPDNSDVDKLFIQLVQTYNQLFEENPINASGVDAKAILSARLSKSRRLENLIAQLPGEKKNGLFGNLIALSLGLTPNFKSNFDLAEDAKLQLSKDTYDDDLDNLLAQIGDQYADLFLAAKNLSDAILLSDILRVNTEITKAPLSASMIKRYDEHHQDLTLLKALVRQQLPEKYKEIFFDQSKNGYAGYIDGGASQEEFYKFIKPILEKMDGTEELLVKLNREDLLRKQRTFDNGSIPHQIHLGELHAILRRQEDFYPFLKDNREKIEKILTFRIPYYVGPLARGNSRFAWMTRKSEETITPWNFEEVVDKGASAQSFIERMTNFDKNLPNEKVLPKHSLLYEYFTVYNELTKVKYVTEGMRKPAFLSGEQKKAIVDLLFKTNRKVTVKQLKEDYFKKIECFDSVEISGVEDRFNASLGTYHDLLKIIKDKDFLDNEENEDILEDIVLTLTLFEDREMIEERLKTYAHLFDDKVMKQLKRRRYTGWGRLSRKLINGIRDKQSGKTILDFLKSDGFANRNFMQLIHDDSLTFKEDIQKAQVSGQGDSLHEHIANLAGSPAIKKGILQTVKVVDELVKVMGRHKPENIVIEMARENQTTQKGQKNSRERMKRIEEGIKELGSQILKEHPVENTQLQNEKLYLYYLQNGRDMYVDQELDINRLSDYDVDHIVPQSFLKDDSIDNKVLTRSDKARGKSDNVPSEEVVKKMKNYWRQLLNAKLITQRKFDNLTKAERGGLSELDKAGFIKRQLVETRQITKHVAQILDSRMNTKYDENDKLIREVKVITLKSKLVSDFRKDFQFYKVREINNYHHAHDAYLNAVVGTALIKKYPKLESEFVYGDYKVYDVRKMIAKSEQEIGKATAKYFFYSNIMNFFKTEITLANGEIRKRPLIETNGETGEIVWDKGRDFATVRKVLSMPQVNIVKKTEVQTGGFSKESILPKRNSDKLIARKKDWDPKKYGGFDSPTVAYSVLVVAKVEKGKSKKLKSVKELLGITIMERSSFEKNPIDFLEAKGYKEVKKDLIIKLPKYSLFELENGRKRMLASAGELQKGNELALPSKYVNFLYLASHYEKLKGSPEDNEQKQLFVEQHKHYLDEIIEQISEFSKRVILADANLDKVLSAYNKHRDKPIREQAENIIHLFTLTNLGAPAAFKYFDTTIDRKRYTSTKEVLDATLIHQSITGLYETRIDLSQLGGDGGGGGGSSPAPGGTLNIEDEYRLHETSKEPDVSLGSTWLSDFPQAWAETGGMGLAVRQAPLIIPLKATSTPVSIKQYPMSQEARLGIKPHIQRLLDQGILVPCQSPWNTPLLPVKKPGTNDYRPVQDLREVNKRVEDIHPTVPNPYNLLSGLPPSHQWYTVLDLKDAFFCLRLHPTSQPLFAFEWRDPEMGISGQLTWTRLPQGFKNSPTLFNEALHRDLAGFRIQHPDLILLQYVDDLLLAATSELDCQQGTRALLQTLGDLGYRASAKKAQICQKQVKYLGYLLKEGQRWLTEARKETVMGQPIPKTPRQLREFLGTAGFCRLWIPGFAEMAAPLYPLTKPGTLFNWGPDQQKAFQEIKQALLTAPALGLPDLTKPFELFVDEKQGYAKGVLTQKLGPWRRPVAYLSKKLDPVAAGWPPCLRMVAAIAVLTKDAGKLTMGQPLVILAPHAVEALVKQPPDRWLSNARMTHYQALLLDTDRVQFGPVVALNPATLLPLPEEGLQHDCLDILAEAHGTRSDLMDQPLPDADHTWYTDGSSFLQEGQRKAGAAVTTETEVIWARALPAGTSAQRAELIALTQALKMAEGKKLNVYTDSRYAFATAHIHGEIYRRRGWLTSEGKEIKNKDEILALLKALFLPKRLSIIHCPGHQKGNSAEARGNRMADQAAREVATRETPETSTLLAGKRTADGSEFEKRTADGSEFESPKKKAKVE

SEQ ID NO: 7360 - protein, 2094 aa, synthetic construct
MPAAKRVKLDGGDKKYSIGLDIGTNSVGWAVITDEYKVPSKKFKVLGNTDRHSIKKNLIGALLFDSGETAEATRLKRTARRRYTRRKNRICYLQEIFSNEMAKVDDSFFHRLEESFLVEEDKKHERHPIFGNIVDEVAYHEKYPTIYHLRKKLVDSTDKADLRLIYLALAHMIKFRGHFLIEGDLNPDNSDVDKLFIQLVQTYNQLFEENPINASGVDAKAILSARLSKSRRLENLIAQLPGEKKNGLFGNLIALSLGLTPNFKSNFDLAEDAKLQLSKDTYDDDLDNLLAQIGDQYADLFLAAKNLSDAILLSDILRVNTEITKAPLSASMIKRYDEHHQDLTLLKALVRQQLPEKYKEIFFDQSKNGYAGYIDGGASQEEFYKFIKPILEKMDGTEELLVKLNREDLLRKQRTFDNGSIPHQIHLGELHAILRRQEDFYPFLKDNREKIEKILTFRIPYYVGPLARGNSRFAWMTRKSEETITPWNFEEVVDKGASAQSFIERMTNFDKNLPNEKVLPKHSLLYEYFTVYNELTKVKYVTEGMRKPAFLSGEQKKAIVDLLFKTNRKVTVKQLKEDYFKKIECFDSVEISGVEDRFNASLGTYHDLLKIIKDKDFLDNEENEDILEDIVLTLTLFEDREMIEERLKTYAHLFDDKVMKQLKRRRYTGWGRLSRKLINGIRDKQSGKTILDFLKSDGFANRNFMQLIHDDSLTFKEDIQKAQVSGQGDSLHEHIANLAGSPAIKKGILQTVKVVDELVKVMGRHKPENIVIEMARENQTTQKGQKNSRERMKRIEEGIKELGSQILKEHPVENTQLQNEKLYLYYLQNGRDMYVDQELDINRLSDYDVDHIVPQSFLKDDSIDNKVLTRSDKARGKSDNVPSEEVVKKMKNYWRQLLNAKLITQRKFDNLTKAERGGLSELDKAGFIKRQLVETRQITKHVAQILDSRMNTKYDENDKLIREVKVITLKSKLVSDFRKDFQFYKVREINNYHHAHDAYLNAVVGTALIKKYPKLESEFVYGDYKVYDVRKMIAKSEQEIGKATAKYFFYSNIMNFFKTEITLANGEIRKRPLIETNGETGEIVWDKGRDFATVRKVLSMPQVNIVKKTEVQTGGFSKESILPKRNSDKLIARKKDWDPKKYGGFDSPTVAYSVLVVAKVEKGKSKKLKSVKELLGITIMERSSFEKNPIDFLEAKGYKEVKKDLIIKLPKYSLFELENGRKRMLASAGELQKGNELALPSKYVNFLYLASHYEKLKGSPEDNEQKQLFVEQHKHYLDEIIEQISEFSKRVILADANLDKVLSAYNKHRDKPIREQAENIIHLFTLTNLGAPAAFKYFDTTIDRKRYTSTKEVLDATLIHQSITGLYETRIDLSQLGGDGGGGGGSSPAPGGTLNIEDEYRLHETSKGPDVPLGSTWLSDFPQAWAETGGMGLAVRQAPLIIPLKATSTPVSIKQYPMSQEARLGIKPHIQRLLDQGILVPCQSPWNTPLLPVKKPGTNDYRPVQDLREVNKRVEDIHPTVPNPYNLLSGLPPSHQWYTVLDLKDAFFCLRLHPTSQSLFAFEWRDPEMGISGQLTWTRLPQGFKNSPTLFNEALHRDLADFRIQHPDLILLQYVDDLLLAATSELDCQQGTRALLQTLGDLGYRASAKKAQICQKQVKYLGYLLKEGQRWLTEARKETVMGQPTPKTPRQLREFLGTAGFCRLWIPGFAEMAAPLYPLTKPGTLFEWGPDQQKAYQEIKQALLTAPALGLPDLTKPFELFVDEKQGYAKGVLTQKLGPWRRPVAYLSKKLDPVAAGWPPCLRMVAAIAVLTKDAGKLTMGQPLVILAPHAVEALVKQPPDRWLSNARMTHYQALLLDTDRVQFGPIVALNPATLLPLPEEGLQHDCLDILAEAHGTRPDLTDQPLPDADHTWYTDGSSFLQEGQRKAGAAVTTETEVVWAKALPAGTSAQRAELIALTQALKMAEGKKLNVYTDSRYAFATAHIHGEIYRRRGWLTSEGKEIKNKDEILALLKALFLPKRLSIIHCPGHQKGNRAEARGNRMADQAAREVATRETPETSTLLAGKRTADGSEFEKRTADGSEFESPKKKAKVE

SEQ ID NO: 7361 - protein, 2088 aa, synthetic construct
MPAAKRVKLDGGDKKYSIGLDIGTNSVGWAVITDEYKVPSKKFKVLGNTDRHSIKKNLIGALLFDSGETAEATRLKRTARRRYTRRKNRICYLQEIFSNEMAKVDDSFFHRLEESFLVEEDKKHERHPIFGNIVDEVAYHEKYPTIYHLRKKLVDSTDKADLRLIYLALAHMIKFRGHFLIEGDLNPDNSDVDKLFIQLVQTYNQLFEENPINASGVDAKAILSARLSKSRRLENLIAQLPGEKKNGLFGNLIALSLGLTPNFKSNFDLAEDAKLQLSKDTYDDDLDNLLAQIGDQYADLFLAAKNLSDAILLSDILRVNTEITKAPLSASMIKRYDEHHQDLTLLKALVRQQLPEKYKEIFFDQSKNGYAGYIDGGASQEEFYKFIKPILEKMDGTEELLVKLNREDLLRKQRTFDNGSIPHQIHLGELHAILRRQEDFYPFLKDNREKIEKILTFRIPYYVGPLARGNSRFAWMTRKSEETITPWNFEEVVDKGASAQSFIERMTNFDKNLPNEKVLPKHSLLYEYFTVYNELTKVKYVTEGMRKPAFLSGEQKKAIVDLLFKTNRKVTVKQLKEDYFKKIECFDSVEISGVEDRFNASLGTYHDLLKIIKDKDFLDNEENEDILEDIVLTLTLFEDREMIEERLKTYAHLFDDKVMKQLKRRRYTGWGRLSRKLINGIRDKQSGKTILDFLKSDGFANRNFMQLIHDDSLTFKEDIQKAQVSGQGDSLHEHIANLAGSPAIKKGILQTVKVVDELVKVMGRHKPENIVIEMARENQTTQKGQKNSRERMKRIEEGIKELGSQILKEHPVENTQLQNEKLYLYYLQNGRDMYVDQELDINRLSDYDVDHIVPQSFLKDDSIDNKVLTRSDKARGKSDNVPSEEVVKKMKNYWRQLLNAKLITQRKFDNLTKAERGGLSELDKAGFIKRQLVETRQITKHVAQILDSRMNTKYDENDKLIREVKVITLKSKLVSDFRKDFQFYKVREINNYHHAHDAYLNAVVGTALIKKYPKLESEFVYGDYKVYDVRKMIAKSEQEIGKATAKYFFYSNIMNFFKTEITLANGEIRKRPLIETNGETGEIVWDKGRDFATVRKVLSMPQVNIVKKTEVQTGGFSKESILPKRNSDKLIARKKDWDPKKYGGFDSPTVAYSVLVVAKVEKGKSKKLKSVKELLGITIMERSSFEKNPIDFLEAKGYKEVKKDLIIKLPKYSLFELENGRKRMLASAGELQKGNELALPSKYVNFLYLASHYEKLKGSPEDNEQKQLFVEQHKHYLDEIIEQISEFSKRVILADANLDKVLSAYNKHRDKPIREQAENIIHLFTLTNLGAPAAFKYFDTTIDRKRYTSTKEVLDATLIHQSITGLYETRIDLSQLGGDGGGGGGSSPAPGGTLQLDDEYRLYSPLVKPDQNIQFWLEQFPQAWAETAGMGLAKQVPPQVIQLKASATPVSVRQYPLSKEAQEGIRPHVQRLIQQGILVPVQSPWNTPLLPVRKPGTNDYRPVQDLREVNKRVQDIHPTVPNPYNLLCALPPQRSWYTVLDLKDAFFCLRLHPTSQPLFAFEWRDPGTGRTGQLTWTRLPQGFKNSPTIFDEALHRDLANFRIQHPQVTLLQYVDDLLLAGATKQDCLEGTKALLLELSDLGYRASAKKAQICRREVTYLGYSLRDGQRWLTEARKKTVVQIPAPTTAKQVREFLGTAGFCRLWIPGFATLAAPLYPLTKEKGEFSWAPEHQKAFDAIKKALLSAPALALPDVTKPFTLYVDERKGVARGVLTQTLGPWRRPVAYLSKKLDPVASGWPVCLKAIAAVAILVKDADKLTLGQNITVIAPHALENIVRQPPDRWMTNARMTHYQSLLLTERVTFAPPAALNPATLLPEETDEPVTHDCHQLLIEETGVRKDLTDIPLTGEVLTWFTDGSSYVVEGKRMAGAAVVDGTRTIWASSLPEGTSAQKAELMALTQALRLAEGKSINIYTDSRYAFATAHVHGAIYKQRGLLTSAGREIKNKEEILSLLEALHLPKRLAIIHCPGHQKAKDPISRGNQMADRVAKQAAQGVNLLAGKRTADGSEFEKRTADGSEFESPKKKAKVE

SEQ ID NO: 7362 - protein, 2085 aa, synthetic construct
MPAAKRVKLDGGDKKYSIGLDIGTNSVGWAVITDEYKVPSKKFKVLGNTDRHSIKKNLIGALLFDSGETAEATRLKRTARRRYTRRKNRICYLQEIFSNEMAKVDDSFFHRLEESFLVEEDKKHERHPIFGNIVDEVAYHEKYPTIYHLRKKLVDSTDKADLRLIYLALAHMIKFRGHFLIEGDLNPDNSDVDKLFIQLVQTYNQLFEENPINASGVDAKAILSARLSKSRRLENLIAQLPGEKKNGLFGNLIALSLGLTPNFKSNFDLAEDAKLQLSKDTYDDDLDNLLAQIGDQYADLFLAAKNLSDAILLSDILRVNTEITKAPLSASMIKRYDEHHQDLTLLKALVRQQLPEKYKEIFFDQSKNGYAGYIDGGASQEEFYKFIKPILEKMDGTEELLVKLNREDLLRKQRTFDNGSIPHQIHLGELHAILRRQEDFYPFLKDNREKIEKILTFRIPYYVGPLARGNSRFAWMTRKSEETITPWNFEEVVDKGASAQSFIERMTNFDKNLPNEKVLPKHSLLYEYFTVYNELTKVKYVTEGMRKPAFLSGEQKKAIVDLLFKTNRKVTVKQLKEDYFKKIECFDSVEISGVEDRFNASLGTYHDLLKIIKDKDFLDNEENEDILEDIVLTLTLFEDREMIEERLKTYAHLFDDKVMKQLKRRRYTGWGRLSRKLINGIRDKQSGKTILDFLKSDGFANRNFMQLIHDDSLTFKEDIQKAQVSGQGDSLHEHIANLAGSPAIKKGILQTVKVVDELVKVMGRHKPENIVIEMARENQTTQKGQKNSRERMKRIEEGIKELGSQILKEHPVENTQLQNEKLYLYYLQNGRDMYVDQELDINRLSDYDVDHIVPQSFLKDDSIDNKVLTRSDKARGKSDNVPSEEVVKKMKNYWRQLLNAKLITQRKFDNLTKAERGGLSELDKAGFIKRQLVETRQITKHVAQILDSRMNTKYDENDKLIREVKVITLKSKLVSDFRKDFQFYKVREINNYHHAHDAYLNAVVGTALIKKYPKLESEFVYGDYKVYDVRKMIAKSEQEIGKATAKYFFYSNIMNFFKTEITLANGEIRKRPLIETNGETGEIVWDKGRDFATVRKVLSMPQVNIVKKTEVQTGGFSKESILPKRNSDKLIARKKDWDPKKYGGFDSPTVAYSVLVVAKVEKGKSKKLKSVKELLGITIMERSSFEKNPIDFLEAKGYKEVKKDLIIKLPKYSLFELENGRKRMLASAGELQKGNELALPSKYVNFLYLASHYEKLKGSPEDNEQKQLFVEQHKHYLDEIIEQISEFSKRVILADANLDKVLSAYNKHRDKPIREQAENIIHLFTLTNLGAPAAFKYFDTTIDRKRYTSTKEVLDATLIHQSITGLYETRIDLSQLGGDGGGGGGSSPAPGGIPWLMKKPLQLTTLVPLQEYEERLLKQTMLTGSYKEKLQSLFLKYDALWQHWENQVGHRRIKPHHIATGTVNPRPQKQYPINPKAKASIQTVINDLLKQGVLIQQNSIMNTPVYPVPKPDGKWRMVLDYREVNKTIPLIAAQNQHSAGILSSIFRGKYKTTLDLSNGFWAHSITPESYWLTAFTWLGQQYCWTRLPQGFLNSPALFNADVVDLLKEVPNVQVYVDDIYISHDDPREHLEQLEKVFSLLLNAGYVVSLKKSEIAQHEVEFLGFNITKEGRGLTETFKQKLLNITPPRDLKQLQSILGKLNFARNFIPNFSELVKPLYNIIATAPGKYITWTTDNSQQLQNIISMLNSAENLEERNPEVRLIMKVNTSPSAGYIRFYNEFAKRPIMYLNYVYTKAEVKFTNTEKLLTTIHKGLIKALDLGMGQEILVYSPIVSMTKIQKTPLPERKALPIRWITWMSYLEDPRIQFHYDKTLPELQQVPTVTDDIIAKIKHPSEFSMVFYTDGSAIKHPNVNKSHNAGMGIAQVQFKPEFTVINTWSIPLGDHTAQLAEVAAVEFACKKALKIDGPVLIVTDSFYVAESVNKELPYWQSNGFFNNKKKPLKHVSKWKSIADCIQLKPDIIIIHEKGHQPTASTFHTEGNNLADKLATQGSYVVNAGKRTADGSEFEKRTADGSEFESPKKKAKVE

SEQ ID NO: 7363 - protein, 2174 aa, synthetic construct
MPAAKRVKLDGGDKKYSIGLDIGTNSVGWAVITDEYKVPSKKFKVLGNTDRHSIKKNLIGALLFDSGETAEATRLKRTARRRYTRRKNRICYLQEIFSNEMAKVDDSFFHRLEESFLVEEDKKHERHPIFGNIVDEVAYHEKYPTIYHLRKKLVDSTDKADLRLIYLALAHMIKFRGHFLIEGDLNPDNSDVDKLFIQLVQTYNQLFEENPINASGVDAKAILSARLSKSRRLENLIAQLPGEKKNGLFGNLIALSLGLTPNFKSNFDLAEDAKLQLSKDTYDDDLDNLLAQIGDQYADLFLAAKNLSDAILLSDILRVNTEITKAPLSASMIKRYDEHHQDLTLLKALVRQQLPEKYKEIFFDQSKNGYAGYIDGGASQEEFYKFIKPILEKMDGTEELLVKLNREDLLRKQRTFDNGSIPHQIHLGELHAILRRQEDFYPFLKDNREKIEKILTFRIPYYVGPLARGNSRFAWMTRKSEETITPWNFEEVVDKGASAQSFIERMTNFDKNLPNEKVLPKHSLLYEYFTVYNELTKVKYVTEGMRKPAFLSGEQKKAIVDLLFKTNRKVTVKQLKEDYFKKIECFDSVEISGVEDRFNASLGTYHDLLKIIKDKDFLDNEENEDILEDIVLTLTLFEDREMIEERLKTYAHLFDDKVMKQLKRRRYTGWGRLSRKLINGIRDKQSGKTILDFLKSDGFANRNFMQLIHDDSLTFKEDIQKAQVSGQGDSLHEHIANLAGSPAIKKGILQTVKVVDELVKVMGRHKPENIVIEMARENQTTQKGQKNSRERMKRIEEGIKELGSQILKEHPVENTQLQNEKLYLYYLQNGRDMYVDQELDINRLSDYDVDHIVPQSFLKDDSIDNKVLTRSDKARGKSDNVPSEEVVKKMKNYWRQLLNAKLITQRKFDNLTKAERGGLSELDKAGFIKRQLVETRQITKHVAQILDSRMNTKYDENDKLIREVKVITLKSKLVSDFRKDFQFYKVREINNYHHAHDAYLNAVVGTALIKKYPKLESEFVYGDYKVYDVRKMIAKSEQEIGKATAKYFFYSNIMNFFKTEITLANGEIRKRPLIETNGETGEIVWDKGRDFATVRKVLSMPQVNIVKKTEVQTGGFSKESILPKRNSDKLIARKKDWDPKKYGGFDSPTVAYSVLVVAKVEKGKSKKLKSVKELLGITIMERSSFEKNPIDFLEAKGYKEVKKDLIIKLPKYSLFELENGRKRMLASAGELQKGNELALPSKYVNFLYLASHYEKLKGSPEDNEQKQLFVEQHKHYLDEIIEQISEFSKRVILADANLDKVLSAYNKHRDKPIREQAENIIHLFTLTNLGAPAAFKYFDTTIDRKRYTSTKEVLDATLIHQSITGLYETRIDLSQLGGDGGGGGGSSPAPGGMNPLQLLQPLPAEVKGTKLLAHWNSGATITCIPESFLEDEQPIKQTLIKTIHGEKQQNVYYLTFKVKGRKVEAEVIASPYEYILLSPTDVPWLTQQPLQLTILVPLQEYQDRILNKTALPEEQKQQLKALFTKYDNLWQHWENQVGHRKIRPHNIATGDYPPRPQKQYPINPKAKPSIQIVIDDLLKQGVLTPQNSTMNTPVYPVPKPDGRWRMVLDYREVNKTIPLTAAQNQHSAGILATIVRQKYKTTLDLANGFWAHPITPDSYWLTAFTWQGKQYCWTRLPQGFLNSPALFTADAVDLLKEVPNVQVYVDDIYLSHDNPHEHIQQLEKVFQILLQAGYVVSLKKSEIGQRTVEFLGFNITKEGRGLTDTFKTKLLNVTPPKDLKQLQSILGLLNFARNFIPNFAELVQTLYNLIASSKGKYIEWTEDNTKQLNKVIEALNTASNLEERLPDQRLVIKVNTSPSAGYVRYYNESGKKPIMYLNYVFSKAELKFSMLEKLLTTMHKALIKAMDLAMGQEILVYSPIVSMTKIQKTPLPERKALPIRWITWMTYLEDPRIQFHYDKTLPELKHIPDVYTSSIPPLKHPSQYEGVFCTDGSAIKSPDPTKSNNAGMGIVHAIYNPEYKILNQWSIPLGHHTAQMAEIAAVEFACKKALKVPGPVLVITDSFYVAESANKELPYWKSNGFVNNKKEPLKHISKWKSIAECLSIKPDITIQHEKGHQPINTSIHTEGNALADKLATQGSYVVNAGKRTADGSEFEKRTADGSEFESPKKKAKVE

SEQ ID NO: 7364 - protein, 2093 aa, synthetic construct
MPAAKRVKLDGGDKKYSIGLDIGTNSVGWAVITDEYKVPSKKFKVLGNTDRHSIKKNLIGALLFDSGETAEATRLKRTARRRYTRRKNRICYLQEIFSNEMAKVDDSFFHRLEESFLVEEDKKHERHPIFGNIVDEVAYHEKYPTIYHLRKKLVDSTDKADLRLIYLALAHMIKFRGHFLIEGDLNPDNSDVDKLFIQLVQTYNQLFEENPINASGVDAKAILSARLSKSRRLENLIAQLPGEKKNGLFGNLIALSLGLTPNFKSNFDLAEDAKLQLSKDTYDDDLDNLLAQIGDQYADLFLAAKNLSDAILLSDILRVNTEITKAPLSASMIKRYDEHHQDLTLLKALVRQQLPEKYKEIFFDQSKNGYAGYIDGGASQEEFYKFIKPILEKMDGTEELLVKLNREDLLRKQRTFDNGSIPHQIHLGELHAILRRQEDFYPFLKDNREKIEKILTFRIPYYVGPLARGNSRFAWMTRKSEETITPWNFEEVVDKGASAQSFIERMTNFDKNLPNEKVLPKHSLLYEYFTVYNELTKVKYVTEGMRKPAFLSGEQKKAIVDLLFKTNRKVTVKQLKEDYFKKIECFDSVEISGVEDRFNASLGTYHDLLKIIKDKDFLDNEENEDILEDIVLTLTLFEDREMIEERLKTYAHLFDDKVMKQLKRRRYTGWGRLSRKLINGIRDKQSGKTILDFLKSDGFANRNFMQLIHDDSLTFKEDIQKAQVSGQGDSLHEHIANLAGSPAIKKGILQTVKVVDELVKVMGRHKPENIVIEMARENQTTQKGQKNSRERMKRIEEGIKELGSQILKEHPVENTQLQNEKLYLYYLQNGRDMYVDQELDINRLSDYDVDHIVPQSFLKDDSIDNKVLTRSDKARGKSDNVPSEEVVKKMKNYWRQLLNAKLITQRKFDNLTKAERGGLSELDKAGFIKRQLVETRQITKHVAQILDSRMNTKYDENDKLIREVKVITLKSKLVSDFRKDFQFYKVREINNYHHAHDAYLNAVVGTALIKKYPKLESEFVYGDYKVYDVRKMIAKSEQEIGKATAKYFFYSNIMNFFKTEITLANGEIRKRPLIETNGETGEIVWDKGRDFATVRKVLSMPQVNIVKKTEVQTGGFSKESILPKRNSDKLIARKKDWDPKKYGGFDSPTVAYSVLVVAKVEKGKSKKLKSVKELLGITIMERSSFEKNPIDFLEAKGYKEVKKDLIIKLPKYSLFELENGRKRMLASAGELQKGNELALPSKYVNFLYLASHYEKLKGSPEDNEQKQLFVEQHKHYLDEIIEQISEFSKRVILADANLDKVLSAYNKHRDKPIREQAENIIHLFTLTNLGAPAAFKYFDTTIDRKRYTSTKEVLDATLIHQSITGLYETRIDLSQLGGDGGGGGPAPGSSGGTLQLEEEYRLFEPESTQKQEMDIWLKNFPQAWAETGGMGTAHCQAPVLIQLKATATPISIRQYPMPHEAYQGIKPHIRRMLDQGILKPCQSPWNTPLLPVKKPGTEDYRPVQDLREVNKRVEDIHPTVPNPYNLLSTLPPSHPWYTVLDLKDAFFCLRLHSESQLLFAFEWRDPEIGLSGQLTWTRLPQGFKNSPTLFNEALHSDLADFRVRYPALVLLQYVDDLLLAAATRTECLEGTKALLETLGNKGYRASAKKAQICLQEVTYLGYSLKDGQRWLTKARKEAILSIPVPKNSRQVREFLGTAGYCRLWIPGFAELAAPLYPLTRPGTLFQWGTEQQLAFEDIKKALLSSPALGLPDITKPFELFIDENSGFAKGVLVQKLGPWKRPVAYLSKKLDTVASGWPPCLRMVAAIAILVKDAGKLTLGQPLTILTSHPVEALVRQPPNKWLSNARMTHYQAMLLDAERVHFGPTVSLNPATLLPLPSGGNHHDCLQILAETHGTRPDLTDQPLPDADLTWYTDGSSFIRNGEREAGAAVTTESEVIWAAPLPPGTSAQRAELIALTQALKMAEGKKLTVYTDSRYAFATTHVHGEIYRRRGWLTSEGKEIKNKNEILALLEALFLPKRLSIIHCPGHQKGDSPQAKGNRLADDTAKKAATETHSSLTVLPAGKRTADGSEFEKRTADGSEFESPKKKAKVE

SEQ ID NO: 7365 - protein, 2093 aa, synthetic construct
MPAAKRVKLDGGDKKYSIGLDIGTNSVGWAVITDEYKVPSKKFKVLGNTDRHSIKKNLIGALLFDSGETAEATRLKRTARRRYTRRKNRICYLQEIFSNEMAKVDDSFFHRLEESFLVEEDKKHERHPIFGNIVDEVAYHEKYPTIYHLRKKLVDSTDKADLRLIYLALAHMIKFRGHFLIEGDLNPDNSDVDKLFIQLVQTYNQLFEENPINASGVDAKAILSARLSKSRRLENLIAQLPGEKKNGLFGNLIALSLGLTPNFKSNFDLAEDAKLQLSKDTYDDDLDNLLAQIGDQYADLFLAAKNLSDAILLSDILRVNTEITKAPLSASMIKRYDEHHQDLTLLKALVRQQLPEKYKEIFFDQSKNGYAGYIDGGASQEEFYKFIKPILEKMDGTEELLVKLNREDLLRKQRTFDNGSIPHQIHLGELHAILRRQEDFYPFLKDNREKIEKILTFRIPYYVGPLARGNSRFAWMTRKSEETITPWNFEEVVDKGASAQSFIERMTNFDKNLPNEKVLPKHSLLYEYFTVYNELTKVKYVTEGMRKPAFLSGEQKKAIVDLLFKTNRKVTVKQLKEDYFKKIECFDSVEISGVEDRFNASLGTYHDLLKIIKDKDFLDNEENEDILEDIVLTLTLFEDREMIEERLKTYAHLFDDKVMKQLKRRRYTGWGRLSRKLINGIRDKQSGKTILDFLKSDGFANRNFMQLIHDDSLTFKEDIQKAQVSGQGDSLHEHIANLAGSPAIKKGILQTVKVVDELVKVMGRHKPENIVIEMARENQTTQKGQKNSRERMKRIEEGIKELGSQILKEHPVENTQLQNEKLYLYYLQNGRDMYVDQELDINRLSDYDVDHIVPQSFLKDDSIDNKVLTRSDKARGKSDNVPSEEVVKKMKNYWRQLLNAKLITQRKFDNLTKAERGGLSELDKAGFIKRQLVETRQITKHVAQILDSRMNTKYDENDKLIREVKVITLKSKLVSDFRKDFQFYKVREINNYHHAHDAYLNAVVGTALIKKYPKLESEFVYGDYKVYDVRKMIAKSEQEIGKATAKYFFYSNIMNFFKTEITLANGEIRKRPLIETNGETGEIVWDKGRDFATVRKVLSMPQVNIVKKTEVQTGGFSKESILPKRNSDKLIARKKDWDPKKYGGFDSPTVAYSVLVVAKVEKGKSKKLKSVKELLGITIMERSSFEKNPIDFLEAKGYKEVKKDLIIKLPKYSLFELENGRKRMLASAGELQKGNELALPSKYVNFLYLASHYEKLKGSPEDNEQKQLFVEQHKHYLDEIIEQISEFSKRVILADANLDKVLSAYNKHRDKPIREQAENIIHLFTLTNLGAPAAFKYFDTTIDRKRYTSTKEVLDATLIHQSITGLYETRIDLSQLGGDGGGGGPAPGSSGGTLQLEEEYRLFEPESTQKQEMDIWLKNFPQAWAETGGMGTAHCQAPVLIQLKATATPISIRQYPMPHEAYQGIKPHIRRMLDQGILKPCQSPWNTPLLPVKKPGTEDYRPVQDLREVNKRVEDIHPTVPNPYNLLSTLPPSHPWYTVLDLKDAFFCLRLHSESQLLFAFEWRDPEIGLSGQLTWTRLPQGFKNSPTLFNEALHSDLADFRVRYPALVLLQYVDDLLLAAATRTECLEGTKALLETLGNKGYRASAKKAQICLQEVTYLGYSLKDGQRWLTKARKEAILSIPVPKNSRQVREFLGKAGYCRLFIPGFAELAAPLYPLTRPGTLFQWGTEQQLAFEDIKKALLSSPALGLPDITKPFELFIDENSGFAKGVLVQKLGPWKRPVAYLSKKLDTVASGWPPCLRMVAAIAILVKDAGKLTLGQPLTILTSHPVEALVRQPPNKWLSNARMTHYQAMLLDAERVHFGPTVSLNPATLLPLPSGGNHHDCLQILAETHGTRPDLTDQPLPDADLTWYTDGSSFIRNGEREAGAAVTTESEVIWAAPLPPGTSAQRAELIALTQALKMAEGKKLTVYTDSRYAFATTHVHGEIYRRRGWLTSEGKEIKNKNEILALLEALFLPKRLSIIHCPGHQKGDSPQAKGNRLADDTAKKAATETHSSLTVLPAGKRTADGSEFEKRTADGSEFESPKKKAKVE

SEQ ID NO: 7366 - protein, 2174 aa, synthetic construct
MPAAKRVKLDGGDKKYSIGLDIGTNSVGWAVITDEYKVPSKKFKVLGNTDRHSIKKNLIGALLFDSGETAEATRLKRTARRRYTRRKNRICYLQEIFSNEMAKVDDSFFHRLEESFLVEEDKKHERHPIFGNIVDEVAYHEKYPTIYHLRKKLVDSTDKADLRLIYLALAHMIKFRGHFLIEGDLNPDNSDVDKLFIQLVQTYNQLFEENPINASGVDAKAILSARLSKSRRLENLIAQLPGEKKNGLFGNLIALSLGLTPNFKSNFDLAEDAKLQLSKDTYDDDLDNLLAQIGDQYADLFLAAKNLSDAILLSDILRVNTEITKAPLSASMIKRYDEHHQDLTLLKALVRQQLPEKYKEIFFDQSKNGYAGYIDGGASQEEFYKFIKPILEKMDGTEELLVKLNREDLLRKQRTFDNGSIPHQIHLGELHAILRRQEDFYPFLKDNREKIEKILTFRIPYYVGPLARGNSRFAWMTRKSEETITPWNFEEVVDKGASAQSFIERMTNFDKNLPNEKVLPKHSLLYEYFTVYNELTKVKYVTEGMRKPAFLSGEQKKAIVDLLFKTNRKVTVKQLKEDYFKKIECFDSVEISGVEDRFNASLGTYHDLLKIIKDKDFLDNEENEDILEDIVLTLTLFEDREMIEERLKTYAHLFDDKVMKQLKRRRYTGWGRLSRKLINGIRDKQSGKTILDFLKSDGFANRNFMQLIHDDSLTFKEDIQKAQVSGQGDSLHEHIANLAGSPAIKKGILQTVKVVDELVKVMGRHKPENIVIEMARENQTTQKGQKNSRERMKRIEEGIKELGSQILKEHPVENTQLQNEKLYLYYLQNGRDMYVDQELDINRLSDYDVDHIVPQSFLKDDSIDNKVLTRSDKARGKSDNVPSEEVVKKMKNYWRQLLNAKLITQRKFDNLTKAERGGLSELDKAGFIKRQLVETRQITKHVAQILDSRMNTKYDENDKLIREVKVITLKSKLVSDFRKDFQFYKVREINNYHHAHDAYLNAVVGTALIKKYPKLESEFVYGDYKVYDVRKMIAKSEQEIGKATAKYFFYSNIMNFFKTEITLANGEIRKRPLIETNGETGEIVWDKGRDFATVRKVLSMPQVNIVKKTEVQTGGFSKESILPKRNSDKLIARKKDWDPKKYGGFDSPTVAYSVLVVAKVEKGKSKKLKSVKELLGITIMERSSFEKNPIDFLEAKGYKEVKKDLIIKLPKYSLFELENGRKRMLASAGELQKGNELALPSKYVNFLYLASHYEKLKGSPEDNEQKQLFVEQHKHYLDEIIEQISEFSKRVILADANLDKVLSAYNKHRDKPIREQAENIIHLFTLTNLGAPAAFKYFDTTIDRKRYTSTKEVLDATLIHQSITGLYETRIDLSQLGGDGGGGGPAPGSSGGMNPLQLLQPLPAEIKGTKLLAHWNSGATITCIPESFLEDEQPIKKTLIKTIHGEKQQNVYYVTFKVKGRKVEAEVIASPYEYILLSPTDVPWLTQQPLQLTILVPLQEYQEKILSKTALPEDQKQQLKTLFVKYDNLWQHWENQVGHRKIRPHNIATGDYPPRPQKQYPINPKAKPSIQIVIDDLLKQGVLTPQNSTMNTPVYPVPKPDGRWRMVLDYREVNKTIPLTAAQNQHSAGILATIVRQKYKTTLDLANGFWAHPITPESYWLTAFTWQGKQYCWTRLPQGFLNSPALFNADVVDLLKEIPNVQVYVDDIYLSHDDPKEHVQQLEKVFQILLQAGYVVSLKKSEIGQKTVEFLGFNITKEGRGLTDTFKTKLLNITPPKDLKQLQSILGLLNFARNFIPNFAELVQPLYNLIAPAKGKYIEWSEENTKQLNMVIEALNTASNLEERLPEQRLVIKVNTSPSAGYVRYYNETGKKPIMYLNYVFSKAELKFSMLEKLLTTMHKALIKAMDLAMGQEILVYSPIVSMTKIQKTPLPERKALPIRWITWMTYLEDPRIQFHYDKTLPELKHIPDVYTSSQSPVKHPSQYEGVFYTDGSAIKSPDPTKSNNAGMGIVHATYKPEYQVLNQWSIPLGNHTAQMAEIAAVEFACKKALKIPGPVLVITDSFYVAESANKELPYWKSNGFVNNKKKPLKHISKWKSIAECLSMKPDITIQHEKGISLQIPVFILKGNALADKLATQGSYVVNAGKRTADGSEFEKRTADGSEFESPKKKAKVE

SEQ ID NO: 7367 - protein, 2007 aa, synthetic construct
MPAAKRVKLDGGDKKYSIGLDIGTNSVGWAVITDEYKVPSKKFKVLGNTDRHSIKKNLIGALLFDSGETAEATRLKRTARRRYTRRKNRICYLQEIFSNEMAKVDDSFFHRLEESFLVEEDKKHERHPIFGNIVDEVAYHEKYPTIYHLRKKLVDSTDKADLRLIYLALAHMIKFRGHFLIEGDLNPDNSDVDKLFIQLVQTYNQLFEENPINASGVDAKAILSARLSKSRRLENLIAQLPGEKKNGLFGNLIALSLGLTPNFKSNFDLAEDAKLQLSKDTYDDDLDNLLAQIGDQYADLFLAAKNLSDAILLSDILRVNTEITKAPLSASMIKRYDEHHQDLTLLKALVRQQLPEKYKEIFFDQSKNGYAGYIDGGASQEEFYKFIKPILEKMDGTEELLVKLNREDLLRKQRTFDNGSIPHQIHLGELHAILRRQEDFYPFLKDNREKIEKILTFRIPYYVGPLARGNSRFAWMTRKSEETITPWNFEEVVDKGASAQSFIERMTNFDKNLPNEKVLPKHSLLYEYFTVYNELTKVKYVTEGMRKPAFLSGEQKKAIVDLLFKTNRKVTVKQLKEDYFKKIECFDSVEISGVEDRFNASLGTYHDLLKIIKDKDFLDNEENEDILEDIVLTLTLFEDREMIEERLKTYAHLFDDKVMKQLKRRRYTGWGRLSRKLINGIRDKQSGKTILDFLKSDGFANRNFMQLIHDDSLTFKEDIQKAQVSGQGDSLHEHIANLAGSPAIKKGILQTVKVVDELVKVMGRHKPENIVIEMARENQTTQKGQKNSRERMKRIEEGIKELGSQILKEHPVENTQLQNEKLYLYYLQNGRDMYVDQELDINRLSDYDVDHIVPQSFLKDDSIDNKVLTRSDKARGKSDNVPSEEVVKKMKNYWRQLLNAKLITQRKFDNLTKAERGGLSELDKAGFIKRQLVETRQITKHVAQILDSRMNTKYDENDKLIREVKVITLKSKLVSDFRKDFQFYKVREINNYHHAHDAYLNAVVGTALIKKYPKLESEFVYGDYKVYDVRKMIAKSEQEIGKATAKYFFYSNIMNFFKTEITLANGEIRKRPLIETNGETGEIVWDKGRDFATVRKVLSMPQVNIVKKTEVQTGGFSKESILPKRNSDKLIARKKDWDPKKYGGFDSPTVAYSVLVVAKVEKGKSKKLKSVKELLGITIMERSSFEKNPIDFLEAKGYKEVKKDLIIKLPKYSLFELENGRKRMLASAGELQKGNELALPSKYVNFLYLASHYEKLKGSPEDNEQKQLFVEQHKHYLDEIIEQISEFSKRVILADANLDKVLSAYNKHRDKPIREQAENIIHLFTLTNLGAPAAFKYFDTTIDRKRYTSTKEVLDATLIHQSITGLYETRIDLSQLGGDGGGGGPAPGSSGGGLEHLPPPPEVSQFPLNPERLQALTDLVSRALEAKHIEPYQGPGNNPIFPVKKPNGKWRFIHDLRATNSLTRDLASPSPGPPDLTSLPQDLPHLRTIDLTDAFFQIPLPAVFQPYFAFTLPQPNNHGPGTRYSWRVLPQGFKNSPTLFQQQLSHILAPVRKAFPNSLIIQYMDDILLASPALRELTALTDKVTNALTKEGLPMSLEKTQATPGSIHFLGQVISPDCITYETLPSIHVKSIWSLAELQSMLGELQWVSKGTPVLRSSLHQLYLALRGHRDPRDTIELTSTQVQALKTIQKALALNCRSRLVSQLPILALIILRPTGTTAVLFQTKQKWPLVWLHTPHPATSLRPWGQLLANAIITLDKYSLQHYGQICKSFHHNISNQALTYYLHTSDQSSVAILLQHSHRFHNLGAQPSGPWRSLLQVPQIFQNIDVLRPPFIISPVVIDHAPCLFSDGATSKAAFILWDKQVIHQQVLPLPSTCSAQAGELFGLLAGLQKSKPWPALNIFLDSKFLIGHLRRMAWGAFLGPSTQCDLHARLFPLLQGKTVYVHHVRSHTLLQDPISRLNEATDALMLAPLLPLAGKRTADGSEFEKRTADGSEFESPKKKAKVE

SEQ ID NO: 7368 - protein, 2125 aa, synthetic construct
MPAAKRVKLDGGDKKYSIGLDIGTNSVGWAVITDEYKVPSKKFKVLGNTDRHSIKKNLIGALLFDSGETAEATRLKRTARRRYTRRKNRICYLQEIFSNEMAKVDDSFFHRLEESFLVEEDKKHERHPIFGNIVDEVAYHEKYPTIYHLRKKLVDSTDKADLRLIYLALAHMIKFRGHFLIEGDLNPDNSDVDKLFIQLVQTYNQLFEENPINASGVDAKAILSARLSKSRRLENLIAQLPGEKKNGLFGNLIALSLGLTPNFKSNFDLAEDAKLQLSKDTYDDDLDNLLAQIGDQYADLFLAAKNLSDAILLSDILRVNTEITKAPLSASMIKRYDEHHQDLTLLKALVRQQLPEKYKEIFFDQSKNGYAGYIDGGASQEEFYKFIKPILEKMDGTEELLVKLNREDLLRKQRTFDNGSIPHQIHLGELHAILRRQEDFYPFLKDNREKIEKILTFRIPYYVGPLARGNSRFAWMTRKSEETITPWNFEEVVDKGASAQSFIERMTNFDKNLPNEKVLPKHSLLYEYFTVYNELTKVKYVTEGMRKPAFLSGEQKKAIVDLLFKTNRKVTVKQLKEDYFKKIECFDSVEISGVEDRFNASLGTYHDLLKIIKDKDFLDNEENEDILEDIVLTLTLFEDREMIEERLKTYAHLFDDKVMKQLKRRRYTGWGRLSRKLINGIRDKQSGKTILDFLKSDGFANRNFMQLIHDDSLTFKEDIQKAQVSGQGDSLHEHIANLAGSPAIKKGILQTVKVVDELVKVMGRHKPENIVIEMARENQTTQKGQKNSRERMKRIEEGIKELGSQILKEHPVENTQLQNEKLYLYYLQNGRDMYVDQELDINRLSDYDVDHIVPQSFLKDDSIDNKVLTRSDKARGKSDNVPSEEVVKKMKNYWRQLLNAKLITQRKFDNLTKAERGGLSELDKAGFIKRQLVETRQITKHVAQILDSRMNTKYDENDKLIREVKVITLKSKLVSDFRKDFQFYKVREINNYHHAHDAYLNAVVGTALIKKYPKLESEFVYGDYKVYDVRKMIAKSEQEIGKATAKYFFYSNIMNFFKTEITLANGEIRKRPLIETNGETGEIVWDKGRDFATVRKVLSMPQVNIVKKTEVQTGGFSKESILPKRNSDKLIARKKDWDPKKYGGFDSPTVAYSVLVVAKVEKGKSKKLKSVKELLGITIMERSSFEKNPIDFLEAKGYKEVKKDLIIKLPKYSLFELENGRKRMLASAGELQKGNELALPSKYVNFLYLASHYEKLKGSPEDNEQKQLFVEQHKHYLDEIIEQISEFSKRVILADANLDKVLSAYNKHRDKPIREQAENIIHLFTLTNLGAPAAFKYFDTTIDRKRYTSTKEVLDATLIHQSITGLYETRIDLSQLGGDGGGGGPAPGSSGGLLGRDLLTKLKAQIQFSTEGPQVTWEDRPAMCLVLNLEEEYRLHEKPVPPSIDPSWLQLFPMVWAEKAGMGLANQVPPVVVELKSDASPVAVRQYPMSKEAREGIRPHIQRFLDLGILVPCQSPWNTPLLPVKKPGTNDYRPVQDLREVNKRVQDIHPTVPNPYNLLSSLPPSHTWYSVLDLKDAFFCLKLHPNSQPLFAFEWRDPEKGNTGQLTWTRLPQGFKNSPTLFNEALHRDLASFRALNPQVVMLQYVDDLLVAAPTYRDCKEGTRRLLQELSKLGYRVSAKKAQLCREEVTYLGYLLKGGKRWLTPARKATVMKIPTPTTPRQVREFLGTAGFCRLWIPGFASLAAPLYPLTRPKVPFTWTEAHQEAFGRIKEALLSAPALALPDLTKPFALYVDEKEGVARGVLTQTLGPWRRPVAYLSKKLDPVASGWPTCLKAIAAVALLLKDADKLTLGQNVLVIAPHNLESIVRQPPDRWMTNARMTHYQSLLLNERVSFAPPAILNPATLLPVESDDTPIHICSEILAEETGTRPDLRDQPLPGVPAWYTDGSSFIMDGRRQAGAAIVDNKRTVWASNLPEGTSAQKAELIALTQALRLAEGKSINIYTDSRYAFATAHVHGAIYKQRGWLTSAGKDIKNKEEILALLEAIHLPKRVAIIHCPGHQRGTDPVATGNRKADEAAKQAAQSTRILTETTKNAGKRTADGSEFEKRTADGSEFESPKKKAKVE

SEQ ID NO: 7369 - protein, 2125 aa, synthetic construct
MPAAKRVKLDGGDKKYSIGLDIGTNSVGWAVITDEYKVPSKKFKVLGNTDRHSIKKNLIGALLFDSGETAEATRLKRTARRRYTRRKNRICYLQEIFSNEMAKVDDSFFHRLEESFLVEEDKKHERHPIFGNIVDEVAYHEKYPTIYHLRKKLVDSTDKADLRLIYLALAHMIKFRGHFLIEGDLNPDNSDVDKLFIQLVQTYNQLFEENPINASGVDAKAILSARLSKSRRLENLIAQLPGEKKNGLFGNLIALSLGLTPNFKSNFDLAEDAKLQLSKDTYDDDLDNLLAQIGDQYADLFLAAKNLSDAILLSDILRVNTEITKAPLSASMIKRYDEHHQDLTLLKALVRQQLPEKYKEIFFDQSKNGYAGYIDGGASQEEFYKFIKPILEKMDGTEELLVKLNREDLLRKQRTFDNGSIPHQIHLGELHAILRRQEDFYPFLKDNREKIEKILTFRIPYYVGPLARGNSRFAWMTRKSEETITPWNFEEVVDKGASAQSFIERMTNFDKNLPNEKVLPKHSLLYEYFTVYNELTKVKYVTEGMRKPAFLSGEQKKAIVDLLFKTNRKVTVKQLKEDYFKKIECFDSVEISGVEDRFNASLGTYHDLLKIIKDKDFLDNEENEDILEDIVLTLTLFEDREMIEERLKTYAHLFDDKVMKQLKRRRYTGWGRLSRKLINGIRDKQSGKTILDFLKSDGFANRNFMQLIHDDSLTFKEDIQKAQVSGQGDSLHEHIANLAGSPAIKKGILQTVKVVDELVKVMGRHKPENIVIEMARENQTTQKGQKNSRERMKRIEEGIKELGSQILKEHPVENTQLQNEKLYLYYLQNGRDMYVDQELDINRLSDYDVDHIVPQSFLKDDSIDNKVLTRSDKARGKSDNVPSEEVVKKMKNYWRQLLNAKLITQRKFDNLTKAERGGLSELDKAGFIKRQLVETRQITKHVAQILDSRMNTKYDENDKLIREVKVITLKSKLVSDFRKDFQFYKVREINNYHHAHDAYLNAVVGTALIKKYPKLESEFVYGDYKVYDVRKMIAKSEQEIGKATAKYFFYSNIMNFFKTEITLANGEIRKRPLIETNGETGEIVWDKGRDFATVRKVLSMPQVNIVKKTEVQTGGFSKESILPKRNSDKLIARKKDWDPKKYGGFDSPTVAYSVLVVAKVEKGKSKKLKSVKELLGITIMERSSFEKNPIDFLEAKGYKEVKKDLIIKLPKYSLFELENGRKRMLASAGELQKGNELALPSKYVNFLYLASHYEKLKGSPEDNEQKQLFVEQHKHYLDEIIEQISEFSKRVILADANLDKVLSAYNKHRDKPIREQAENIIHLFTLTNLGAPAAFKYFDTTIDRKRYTSTKEVLDATLIHQSITGLYETRIDLSQLGGDGGGGGPAPGSSGGLLGRDLLTKLKAQIQFSTEGPQVTWEDRPAMCLVLNLEEEYRLHEKPVPPSIDPSWLQLFPMVWAEKAGMGLANQVPPVVVELKSDASPVAVRQYPMSKEAREGIRPHIQRFLDLGILVPCQSPWNTPLLPVKKPGTNDYRPVQDLREVNKRVQDIHPTVPNPYNLLSSLPPSHTWYSVLDLKDAFFCLKLHPNSQPLFAFEWRDPEKGNTGQLTWTRLPQGFKNSPTLFNEALHRDLASFRALNPQVVMLQYVDDLLVAAPTYRDCKEGTRRLLQELSKLGYRVSAKKAQLCREEVTYLGYLLKGGKRWLTPARKATVMKIPTPTTPRQVREFLGKAGFCRLFIPGFASLAAPLYPLTRPKVPFTWTEAHQEAFGRIKEALLSAPALALPDLTKPFALYVDEKEGVARGVLTQTLGPWRRPVAYLSKKLDPVASGWPTCLKAIAAVALLLKDADKLTLGQNVLVIAPHNLESIVRQPPDRWMTNARMTHYQSLLLNERVSFAPPAILNPATLLPVESDDTPIHICSEILAEETGTRPDLRDQPLPGVPAWYTDGSSFIMDGRRQAGAAIVDNKRTVWASNLPEGTSAQKAELIALTQALRLAEGKSINIYTDSRYAFATAHVHGAIYKQRGWLTSAGKDIKNKEEILALLEAIHLPKRVAIIHCPGHQRGTDPVATGNRKADEAAKQAAQSTRILTETTKNAGKRTADGSEFEKRTADGSEFESPKKKAKVE

SEQ ID NO: 7370 - protein, 2216 aa, synthetic construct
MPAAKRVKLDGGDKKYSIGLDIGTNSVGWAVITDEYKVPSKKFKVLGNTDRHSIKKNLIGALLFDSGETAEATRLKRTARRRYTRRKNRICYLQEIFSNEMAKVDDSFFHRLEESFLVEEDKKHERHPIFGNIVDEVAYHEKYPTIYHLRKKLVDSTDKADLRLIYLALAHMIKFRGHFLIEGDLNPDNSDVDKLFIQLVQTYNQLFEENPINASGVDAKAILSARLSKSRRLENLIAQLPGEKKNGLFGNLIALSLGLTPNFKSNFDLAEDAKLQLSKDTYDDDLDNLLAQIGDQYADLFLAAKNLSDAILLSDILRVNTEITKAPLSASMIKRYDEHHQDLTLLKALVRQQLPEKYKEIFFDQSKNGYAGYIDGGASQEEFYKFIKPILEKMDGTEELLVKLNREDLLRKQRTFDNGSIPHQIHLGELHAILRRQEDFYPFLKDNREKIEKILTFRIPYYVGPLARGNSRFAWMTRKSEETITPWNFEEVVDKGASAQSFIERMTNFDKNLPNEKVLPKHSLLYEYFTVYNELTKVKYVTEGMRKPAFLSGEQKKAIVDLLFKTNRKVTVKQLKEDYFKKIECFDSVEISGVEDRFNASLGTYHDLLKIIKDKDFLDNEENEDILEDIVLTLTLFEDREMIEERLKTYAHLFDDKVMKQLKRRRYTGWGRLSRKLINGIRDKQSGKTILDFLKSDGFANRNFMQLIHDDSLTFKEDIQKAQVSGQGDSLHEHIANLAGSPAIKKGILQTVKVVDELVKVMGRHKPENIVIEMARENQTTQKGQKNSRERMKRIEEGIKELGSQILKEHPVENTQLQNEKLYLYYLQNGRDMYVDQELDINRLSDYDVDHIVPQSFLKDDSIDNKVLTRSDKARGKSDNVPSEEVVKKMKNYWRQLLNAKLITQRKFDNLTKAERGGLSELDKAGFIKRQLVETRQITKHVAQILDSRMNTKYDENDKLIREVKVITLKSKLVSDFRKDFQFYKVREINNYHHAHDAYLNAVVGTALIKKYPKLESEFVYGDYKVYDVRKMIAKSEQEIGKATAKYFFYSNIMNFFKTEITLANGEIRKRPLIETNGETGEIVWDKGRDFATVRKVLSMPQVNIVKKTEVQTGGFSKESILPKRNSDKLIARKKDWDPKKYGGFDSPTVAYSVLVVAKVEKGKSKKLKSVKELLGITIMERSSFEKNPIDFLEAKGYKEVKKDLIIKLPKYSLFELENGRKRMLASAGELQKGNELALPSKYVNFLYLASHYEKLKGSPEDNEQKQLFVEQHKHYLDEIIEQISEFSKRVILADANLDKVLSAYNKHRDKPIREQAENIIHLFTLTNLGAPAAFKYFDTTIDRKRYTSTKEVLDATLIHQSITGLYETRIDLSQLGGDGGGGGPAPGSSGGTLGDQGSRGSDPLPEPRVTLTVEGIPTEFLVNTGAEHSVLTKPMGKMGSKRTVVAGATGSKVYPWTTKRLLKIGQKQVTHSFLVIPECPAPLLGRDLLTKLKAQIQFSTEGPQVTWEDRPAMCLVLNLEEEYRLHEKPVPPSIDPSWLQLFPMVWAEKAGMGLANQVPPVVVELKSDASPVAVRQYPMSKEAREGIRPHIQRFLDLGILVPCQSPWNTPLLPVKKPGTNDYRPVQDLREVNKRVQDIHPTVPNPYNLLSSLPPSHTWYSVLDLKDAFFCLKLHPNSQPLFAFEWRDPEKGNTGQLTWTRLPQGFKNSPTLFNEALHRDLASFRALNPQVVMLQYVDDLLVAAPTYRDCKEGTRRLLQELSKLGYRVSAKKAQLCREEVTYLGYLLKGGKRWLTPARKATVMKIPTPTTPRQVREFLGTAGFCRLWIPGFASLAAPLYPLTRPKVPFTWTEAHQEAFGRIKEALLSAPALALPDLTKPFALYVDEKEGVARGVLTQTLGPWRRPVAYLSKKLDPVASGWPTCLKAIAAVALLLKDADKLTLGQNVLVIAPHNLESIVRQPPDRWMTNARMTHYQSLLLNERVSFAPPAILNPATLLPVESDDTPIHICSEILAEETGTRPDLRDQPLPGVPAWYTDGSSFIMDGRRQAGAAIVDNKRTVWASNLPEGTSAQKAELIALTQALRLAEGKSINIYTDSRYAFATAHVHGAIYKQRGWLTSAGKDIKNKEEILALLEAIHLPKRVAIIHCPGHQRGTDPVATGNRKADEAAKQAAQSTRILTETTKNAGKRTADGSEFEKRTADGSEFESPKKKAKVE

SEQ ID NO: 7371 - protein, 2216 aa, synthetic construct
MPAAKRVKLDGGDKKYSIGLDIGTNSVGWAVITDEYKVPSKKFKVLGNTDRHSIKKNLIGALLFDSGETAEATRLKRTARRRYTRRKNRICYLQEIFSNEMAKVDDSFFHRLEESFLVEEDKKHERHPIFGNIVDEVAYHEKYPTIYHLRKKLVDSTDKADLRLIYLALAHMIKFRGHFLIEGDLNPDNSDVDKLFIQLVQTYNQLFEENPINASGVDAKAILSARLSKSRRLENLIAQLPGEKKNGLFGNLIALSLGLTPNFKSNFDLAEDAKLQLSKDTYDDDLDNLLAQIGDQYADLFLAAKNLSDAILLSDILRVNTEITKAPLSASMIKRYDEHHQDLTLLKALVRQQLPEKYKEIFFDQSKNGYAGYIDGGASQEEFYKFIKPILEKMDGTEELLVKLNREDLLRKQRTFDNGSIPHQIHLGELHAILRRQEDFYPFLKDNREKIEKILTFRIPYYVGPLARGNSRFAWMTRKSEETITPWNFEEVVDKGASAQSFIERMTNFDKNLPNEKVLPKHSLLYEYFTVYNELTKVKYVTEGMRKPAFLSGEQKKAIVDLLFKTNRKVTVKQLKEDYFKKIECFDSVEISGVEDRFNASLGTYHDLLKIIKDKDFLDNEENEDILEDIVLTLTLFEDREMIEERLKTYAHLFDDKVMKQLKRRRYTGWGRLSRKLINGIRDKQSGKTILDFLKSDGFANRNFMQLIHDDSLTFKEDIQKAQVSGQGDSLHEHIANLAGSPAIKKGILQTVKVVDELVKVMGRHKPENIVIEMARENQTTQKGQKNSRERMKRIEEGIKELGSQILKEHPVENTQLQNEKLYLYYLQNGRDMYVDQELDINRLSDYDVDHIVPQSFLKDDSIDNKVLTRSDKARGKSDNVPSEEVVKKMKNYWRQLLNAKLITQRKFDNLTKAERGGLSELDKAGFIKRQLVETRQITKHVAQILDSRMNTKYDENDKLIREVKVITLKSKLVSDFRKDFQFYKVREINNYHHAHDAYLNAVVGTALIKKYPKLESEFVYGDYKVYDVRKMIAKSEQEIGKATAKYFFYSNIMNFFKTEITLANGEIRKRPLIETNGETGEIVWDKGRDFATVRKVLSMPQVNIVKKTEVQTGGFSKESILPKRNSDKLIARKKDWDPKKYGGFDSPTVAYSVLVVAKVEKGKSKKLKSVKELLGITIMERSSFEKNPIDFLEAKGYKEVKKDLIIKLPKYSLFELENGRKRMLASAGELQKGNELALPSKYVNFLYLASHYEKLKGSPEDNEQKQLFVEQHKHYLDEIIEQISEFSKRVILADANLDKVLSAYNKHRDKPIREQAENIIHLFTLTNLGAPAAFKYFDTTIDRKRYTSTKEVLDATLIHQSITGLYETRIDLSQLGGDGGGGGPAPGSSGGTLGDQGSRGSDPLPEPRVTLTVEGIPTEFLVNTGAEHSVLTKPMGKMGSKRTVVAGATGSKVYPWTTKRLLKIGQKQVTHSFLVIPECPAPLLGRDLLTKLKAQIQFSTEGPQVTWEDRPAMCLVLNLEEEYRLHEKPVPPSIDPSWLQLFPMVWAEKAGMGLANQVPPVVVELKSDASPVAVRQYPMSKEAREGIRPHIQRFLDLGILVPCQSPWNTPLLPVKKPGTNDYRPVQDLREVNKRVQDIHPTVPNPYNLLSSLPPSHTWYSVLDLKDAFFCLKLHPNSQPLFAFEWRDPEKGNTGQLTWTRLPQGFKNSPTLFNEALHRDLASFRALNPQVVMLQYVDDLLVAAPTYRDCKEGTRRLLQELSKLGYRVSAKKAQLCREEVTYLGYLLKGGKRWLTPARKATVMKIPTPTTPRQVREFLGKAGFCRLFIPGFASLAAPLYPLTRPKVPFTWTEAHQEAFGRIKEALLSAPALALPDLTKPFALYVDEKEGVARGVLTQTLGPWRRPVAYLSKKLDPVASGWPTCLKAIAAVALLLKDADKLTLGQNVLVIAPHNLESIVRQPPDRWMTNARMTHYQSLLLNERVSFAPPAILNPATLLPVESDDTPIHICSEILAEETGTRPDLRDQPLPGVPAWYTDGSSFIMDGRRQAGAAIVDNKRTVWASNLPEGTSAQKAELIALTQALRLAEGKSINIYTDSRYAFATAHVHGAIYKQRGWLTSAGKDIKNKEEILALLEAIHLPKRVAIIHCPGHQRGTDPVATGNRKADEAAKQAAQSTRILTETTKNAGKRTADGSEFEKRTADGSEFESPKKKAKVE

SEQ ID NO: 7372 - protein, 2094 aa, synthetic construct
MPAAKRVKLDGGDKKYSIGLDIGTNSVGWAVITDEYKVPSKKFKVLGNTDRHSIKKNLIGALLFDSGETAEATRLKRTARRRYTRRKNRICYLQEIFSNEMAKVDDSFFHRLEESFLVEEDKKHERHPIFGNIVDEVAYHEKYPTIYHLRKKLVDSTDKADLRLIYLALAHMIKFRGHFLIEGDLNPDNSDVDKLFIQLVQTYNQLFEENPINASGVDAKAILSARLSKSRRLENLIAQLPGEKKNGLFGNLIALSLGLTPNFKSNFDLAEDAKLQLSKDTYDDDLDNLLAQIGDQYADLFLAAKNLSDAILLSDILRVNTEITKAPLSASMIKRYDEHHQDLTLLKALVRQQLPEKYKEIFFDQSKNGYAGYIDGGASQEEFYKFIKPILEKMDGTEELLVKLNREDLLRKQRTFDNGSIPHQIHLGELHAILRRQEDFYPFLKDNREKIEKILTFRIPYYVGPLARGNSRFAWMTRKSEETITPWNFEEVVDKGASAQSFIERMTNFDKNLPNEKVLPKHSLLYEYFTVYNELTKVKYVTEGMRKPAFLSGEQKKAIVDLLFKTNRKVTVKQLKEDYFKKIECFDSVEISGVEDRFNASLGTYHDLLKIIKDKDFLDNEENEDILEDIVLTLTLFEDREMIEERLKTYAHLFDDKVMKQLKRRRYTGWGRLSRKLINGIRDKQSGKTILDFLKSDGFANRNFMQLIHDDSLTFKEDIQKAQVSGQGDSLHEHIANLAGSPAIKKGILQTVKVVDELVKVMGRHKPENIVIEMARENQTTQKGQKNSRERMKRIEEGIKELGSQILKEHPVENTQLQNEKLYLYYLQNGRDMYVDQELDINRLSDYDVDHIVPQSFLKDDSIDNKVLTRSDKARGKSDNVPSEEVVKKMKNYWRQLLNAKLITQRKFDNLTKAERGGLSELDKAGFIKRQLVETRQITKHVAQILDSRMNTKYDENDKLIREVKVITLKSKLVSDFRKDFQFYKVREINNYHHAHDAYLNAVVGTALIKKYPKLESEFVYGDYKVYDVRKMIAKSEQEIGKATAKYFFYSNIMNFFKTEITLANGEIRKRPLIETNGETGEIVWDKGRDFATVRKVLSMPQVNIVKKTEVQTGGFSKESILPKRNSDKLIARKKDWDPKKYGGFDSPTVAYSVLVVAKVEKGKSKKLKSVKELLGITIMERSSFEKNPIDFLEAKGYKEVKKDLIIKLPKYSLFELENGRKRMLASAGELQKGNELALPSKYVNFLYLASHYEKLKGSPEDNEQKQLFVEQHKHYLDEIIEQISEFSKRVILADANLDKVLSAYNKHRDKPIREQAENIIHLFTLTNLGAPAAFKYFDTTIDRKRYTSTKEVLDATLIHQSITGLYETRIDLSQLGGDGGGGGPAPGSSGGTLNIEDEYRLHETSKEPDVSLGSTWLSDFPQAWAETGGMGLAVRQAPLIIPLKATSTPVSIKQYPMSQEARLGIKPHIQRLLDQGILVPCQSPWNTPLLPVKKPGTNDYRPVQDLREVNKRVEDIHPTVPNPYNLLSGLPPSHQWYTVLDLKDAFFCLRLHPTSQPLFAFEWRDPEMGISGQLTWTRLPQGFKNSPTLFNEALHRDLAGFRIQHPDLILLQYVDDLLLAATSELDCQQGTRALLQTLGDLGYRASAKKAQICQKQVKYLGYLLKEGQRWLTEARKETVMGQPIPKTPRQLREFLGKAGFCRLFIPGFAEMAAPLYPLTKPGTLFNWGPDQQKAFQEIKQALLTAPALGLPDLTKPFELFVDEKQGYAKGVLTQKLGPWRRPVAYLSKKLDPVAAGWPPCLRMVAAIAVLTKDAGKLTMGQPLVILAPHAVEALVKQPPDRWLSNARMTHYQALLLDTDRVQFGPVVALNPATLLPLPEEGLQHDCLDILAEAHGTRSDLMDQPLPDADHTWYTDGSSFLQEGQRKAGAAVTTETEVIWARALPAGTSAQRAELIALTQALKMAEGKKLNVYTDSRYAFATAHIHGEIYRRRGWLTSEGKEIKNKDEILALLKALFLPKRLSIIHCPGHQKGNSAEARGNRMADQAAREVATRETPETSTLLAGKRTADGSEFEKRTADGSEFESPKKKAKVE

SEQ ID NO: 7373 - protein, 2094 aa, synthetic construct
MPAAKRVKLDGGDKKYSIGLDIGTNSVGWAVITDEYKVPSKKFKVLGNTDRHSIKKNLIGALLFDSGETAEATRLKRTARRRYTRRKNRICYLQEIFSNEMAKVDDSFFHRLEESFLVEEDKKHERHPIFGNIVDEVAYHEKYPTIYHLRKKLVDSTDKADLRLIYLALAHMIKFRGHFLIEGDLNPDNSDVDKLFIQLVQTYNQLFEENPINASGVDAKAILSARLSKSRRLENLIAQLPGEKKNGLFGNLIALSLGLTPNFKSNFDLAEDAKLQLSKDTYDDDLDNLLAQIGDQYADLFLAAKNLSDAILLSDILRVNTEITKAPLSASMIKRYDEHHQDLTLLKALVRQQLPEKYKEIFFDQSKNGYAGYIDGGASQEEFYKFIKPILEKMDGTEELLVKLNREDLLRKQRTFDNGSIPHQIHLGELHAILRRQEDFYPFLKDNREKIEKILTFRIPYYVGPLARGNSRFAWMTRKSEETITPWNFEEVVDKGASAQSFIERMTNFDKNLPNEKVLPKHSLLYEYFTVYNELTKVKYVTEGMRKPAFLSGEQKKAIVDLLFKTNRKVTVKQLKEDYFKKIECFDSVEISGVEDRFNASLGTYHDLLKIIKDKDFLDNEENEDILEDIVLTLTLFEDREMIEERLKTYAHLFDDKVMKQLKRRRYTGWGRLSRKLINGIRDKQSGKTILDFLKSDGFANRNFMQLIHDDSLTFKEDIQKAQVSGQGDSLHEHIANLAGSPAIKKGILQTVKVVDELVKVMGRHKPENIVIEMARENQTTQKGQKNSRERMKRIEEGIKELGSQILKEHPVENTQLQNEKLYLYYLQNGRDMYVDQELDINRLSDYDVDHIVPQSFLKDDSIDNKVLTRSDKARGKSDNVPSEEVVKKMKNYWRQLLNAKLITQRKFDNLTKAERGGLSELDKAGFIKRQLVETRQITKHVAQILDSRMNTKYDENDKLIREVKVITLKSKLVSDFRKDFQFYKVREINNYHHAHDAYLNAVVGTALIKKYPKLESEFVYGDYKVYDVRKMIAKSEQEIGKATAKYFFYSNIMNFFKTEITLANGEIRKRPLIETNGETGEIVWDKGRDFATVRKVLSMPQVNIVKKTEVQTGGFSKESILPKRNSDKLIARKKDWDPKKYGGFDSPTVAYSVLVVAKVEKGKSKKLKSVKELLGITIMERSSFEKNPIDFLEAKGYKEVKKDLIIKLPKYSLFELENGRKRMLASAGELQKGNELALPSKYVNFLYLASHYEKLKGSPEDNEQKQLFVEQHKHYLDEIIEQISEFSKRVILADANLDKVLSAYNKHRDKPIREQAENIIHLFTLTNLGAPAAFKYFDTTIDRKRYTSTKEVLDATLIHQSITGLYETRIDLSQLGGDGGGGGPAPGSSGGTLNIEDEYRLHETSKGPDVPLGSTWLSDFPQAWAETGGMGLAFRQAPLIISLKATSTPVSIKQYPMSQEARLGIKPHIQRLLDQGILVPCQSPWNTPLLPVKKPGTNDYRPVQDLREVNKRVEDIHPTVPNPYNLLSGLPPSHQWYTVLDLKDAFFCLRLHPTSQSLFAFEWKDPEMGISGQLTWTRLPQGFKNSPTLFNEALHRDLADFRIQHPDLILLQYVDDLLLAATSELDCQQGTRALLQTLGDLGYRASAKKAQICQKQVKYLGYLLKEGQRWLTEARKETVMGQPTPKTPRQLREFLGKAGLCRLFIPGFAEMAAPLYPLTKPGTLFKWGPDQQKAYQEIKQALLTAPALGLPDLTKPFELFVDEKQGYAKGVLTQKLGPWRRPVAYLSKKLDPVAAGWPPCLRMVAAIAVLTKDVGKLTMGQPLVILAPHAVEALVKQPPDRWLSNARMTHYQALLLDTDRVQFGPIVALNPATLLPLPEEGLQHDCLDILAEAHGTRPDLTDQPLPDADHTWYTDGSSFLQEGQRRAGAAVTTETEVIWAKALPAGTSAQRAELIALTQALKMAAGKKLNVYTDSRYAFATAHIHGEIYRRRGWLTSEGKEIKNKDEILALLKALFLPKRLSIIHCPGHQKGNHAEARGNRMADQAAREVATRETPETSTLLAGKRTADGSEFEKRTADGSEFESPKKKAKVE

SEQ ID NO: 7374 - protein, 2094 aa, synthetic construct
MPAAKRVKLDGGDKKYSIGLDIGTNSVGWAVITDEYKVPSKKFKVLGNTDRHSIKKNLIGALLFDSGETAEATRLKRTARRRYTRRKNRICYLQEIFSNEMAKVDDSFFHRLEESFLVEEDKKHERHPIFGNIVDEVAYHEKYPTIYHLRKKLVDSTDKADLRLIYLALAHMIKFRGHFLIEGDLNPDNSDVDKLFIQLVQTYNQLFEENPINASGVDAKAILSARLSKSRRLENLIAQLPGEKKNGLFGNLIALSLGLTPNFKSNFDLAEDAKLQLSKDTYDDDLDNLLAQIGDQYADLFLAAKNLSDAILLSDILRVNTEITKAPLSASMIKRYDEHHQDLTLLKALVRQQLPEKYKEIFFDQSKNGYAGYIDGGASQEEFYKFIKPILEKMDGTEELLVKLNREDLLRKQRTFDNGSIPHQIHLGELHAILRRQEDFYPFLKDNREKIEKILTFRIPYYVGPLARGNSRFAWMTRKSEETITPWNFEEVVDKGASAQSFIERMTNFDKNLPNEKVLPKHSLLYEYFTVYNELTKVKYVTEGMRKPAFLSGEQKKAIVDLLFKTNRKVTVKQLKEDYFKKIECFDSVEISGVEDRFNASLGTYHDLLKIIKDKDFLDNEENEDILEDIVLTLTLFEDREMIEERLKTYAHLFDDKVMKQLKRRRYTGWGRLSRKLINGIRDKQSGKTILDFLKSDGFANRNFMQLIHDDSLTFKEDIQKAQVSGQGDSLHEHIANLAGSPAIKKGILQTVKVVDELVKVMGRHKPENIVIEMARENQTTQKGQKNSRERMKRIEEGIKELGSQILKEHPVENTQLQNEKLYLYYLQNGRDMYVDQELDINRLSDYDVDHIVPQSFLKDDSIDNKVLTRSDKARGKSDNVPSEEVVKKMKNYWRQLLNAKLITQRKFDNLTKAERGGLSELDKAGFIKRQLVETRQITKHVAQILDSRMNTKYDENDKLIREVKVITLKSKLVSDFRKDFQFYKVREINNYHHAHDAYLNAVVGTALIKKYPKLESEFVYGDYKVYDVRKMIAKSEQEIGKATAKYFFYSNIMNFFKTEITLANGEIRKRPLIETNGETGEIVWDKGRDFATVRKVLSMPQVNIVKKTEVQTGGFSKESILPKRNSDKLIARKKDWDPKKYGGFDSPTVAYSVLVVAKVEKGKSKKLKSVKELLGITIMERSSFEKNPIDFLEAKGYKEVKKDLIIKLPKYSLFELENGRKRMLASAGELQKGNELALPSKYVNFLYLASHYEKLKGSPEDNEQKQLFVEQHKHYLDEIIEQISEFSKRVILADANLDKVLSAYNKHRDKPIREQAENIIHLFTLTNLGAPAAFKYFDTTIDRKRYTSTKEVLDATLIHQSITGLYETRIDLSQLGGDGGGGGPAPGSSGGTLNIEDEYRLHETSKGPDVPLGSTWLSDFPQAWAETGGMGLAVRQAPLIIPLKATSTPVSIKQYPMSQEARLGIKPHIQRLLDQGILVPCQSPWNTPLLPVKKPGTNDYRPVQDLREVNKRVEDIHPTVPNPYNLLSGLPPSHQWYTVLDLKDAFFCLRLHPTSQSLFAFEWRDPEMGISGQLTWTRLPQGFKNSPTLFNEALHRDLADFRIQHPDLILLQYVDDLLLAATSELDCQQGTRALLQTLGDLGYRASAKKAQICQKQVKYLGYLLKEGQRWLTEARKETVMGQPTPKTPRQLREFLGTAGFCRLWIPGFAEMAAPLYPLTKPGTLFEWGPDQQKAYQEIKQALLTAPALGLPDLTKPFELFVDEKQGYAKGVLTQKLGPWRRPVAYLSKKLDPVAAGWPPCLRMVAAIAVLTKDAGKLTMGQPLVILAPHAVEALVKQPPDRWLSNARMTHYQALLLDTDRVQFGPIVALNPATLLPLPEEGLQHDCLDILAEAHGTRPDLTDQPLPDADHTWYTDGSSFLQEGQRKAGAAVTTETEVVWAKALPAGTSAQRAELIALTQALKMAEGKKLNVYTDSRYAFATAHIHGEIYRRRGWLTSEGKEIKNKDEILALLKALFLPKRLSIIHCPGHQKGNRAEARGNRMADQAAREVATRETPETSTLLAGKRTADGSEFEKRTADGSEFESPKKKAKVE

SEQ ID NO: 7375 - protein, 2094 aa, synthetic construct
MPAAKRVKLDGGDKKYSIGLDIGTNSVGWAVITDEYKVPSKKFKVLGNTDRHSIKKNLIGALLFDSGETAEATRLKRTARRRYTRRKNRICYLQEIFSNEMAKVDDSFFHRLEESFLVEEDKKHERHPIFGNIVDEVAYHEKYPTIYHLRKKLVDSTDKADLRLIYLALAHMIKFRGHFLIEGDLNPDNSDVDKLFIQLVQTYNQLFEENPINASGVDAKAILSARLSKSRRLENLIAQLPGEKKNGLFGNLIALSLGLTPNFKSNFDLAEDAKLQLSKDTYDDDLDNLLAQIGDQYADLFLAAKNLSDAILLSDILRVNTEITKAPLSASMIKRYDEHHQDLTLLKALVRQQLPEKYKEIFFDQSKNGYAGYIDGGASQEEFYKFIKPILEKMDGTEELLVKLNREDLLRKQRTFDNGSIPHQIHLGELHAILRRQEDFYPFLKDNREKIEKILTFRIPYYVGPLARGNSRFAWMTRKSEETITPWNFEEVVDKGASAQSFIERMTNFDKNLPNEKVLPKHSLLYEYFTVYNELTKVKYVTEGMRKPAFLSGEQKKAIVDLLFKTNRKVTVKQLKEDYFKKIECFDSVEISGVEDRFNASLGTYHDLLKIIKDKDFLDNEENEDILEDIVLTLTLFEDREMIEERLKTYAHLFDDKVMKQLKRRRYTGWGRLSRKLINGIRDKQSGKTILDFLKSDGFANRNFMQLIHDDSLTFKEDIQKAQVSGQGDSLHEHIANLAGSPAIKKGILQTVKVVDELVKVMGRHKPENIVIEMARENQTTQKGQKNSRERMKRIEEGIKELGSQILKEHPVENTQLQNEKLYLYYLQNGRDMYVDQELDINRLSDYDVDHIVPQSFLKDDSIDNKVLTRSDKARGKSDNVPSEEVVKKMKNYWRQLLNAKLITQRKFDNLTKAERGGLSELDKAGFIKRQLVETRQITKHVAQILDSRMNTKYDENDKLIREVKVITLKSKLVSDFRKDFQFYKVREINNYHHAHDAYLNAVVGTALIKKYPKLESEFVYGDYKVYDVRKMIAKSEQEIGKATAKYFFYSNIMNFFKTEITLANGEIRKRPLIETNGETGEIVWDKGRDFATVRKVLSMPQVNIVKKTEVQTGGFSKESILPKRNSDKLIARKKDWDPKKYGGFDSPTVAYSVLVVAKVEKGKSKKLKSVKELLGITIMERSSFEKNPIDFLEAKGYKEVKKDLIIKLPKYSLFELENGRKRMLASAGELQKGNELALPSKYVNFLYLASHYEKLKGSPEDNEQKQLFVEQHKHYLDEIIEQISEFSKRVILADANLDKVLSAYNKHRDKPIREQAENIIHLFTLTNLGAPAAFKYFDTTIDRKRYTSTKEVLDATLIHQSITGLYETRIDLSQLGGDGGGGGPAPGSSGGTLNIEDEYRLHEISTEPDVSPGSTWLSDFPQAWAETGGMGLAVRQAPLIIPLKATSTPVSIKQYPMSQEAKLGIKPHIQRLLDQGILVPCQSPWNTPLLPVKKPGTNDYRPVQGLREVNKRVEDIHPTVPNPYNLLSGLPTSHRWYTVLDLKDAFFCLRLHPTSQPLFASEWRDPGMGISGQLTWTRLPQGFKNSPTLFDEALHRGLADFRIQHPDLILLQYVDDLLLAATSELDCQQGTRALLKTLGNLGYRASAKKAQICQKQVKYLGYLLREGQRWLTEARKETVMGQPTPKTPRQLREFLGTAGFCRLWIPRFAEMAAPLYPLTKTGTLFNWGPDQQKAYHEIKQALLTAPALGLPDLTKPFELFVDEKQGYAKGVLTQKLGPWRRPVAYLSKKLDPVAAGWPPCLRMVAAIAVLTKDAGKLTMGQPLVILAPHAVEALVKQPPDRWLSNARMTHYQAMLLDTDRVQFGPVVALNPATLLPLPEEGAPHDCLEILAETHGTEPDLTDQPIPDADHTWYTDGSSFLQEGQRKAGAAVTTETEVIWARALPAGTSAQRAELIALTQALKMAEGKRLNVYTDSRYAFATAHIHGEIYKRRGLLTSEGREIKNKSEILALLKALFLPKRLSIIHCLGHQKGDSAEARGNRLADQAAREAAIKTPPDTSTLLAGKRTADGSEFEKRTADGSEFESPKKKAKVE

SEQ ID NO: 7376 - protein, 2114 aa, synthetic construct
MPAAKRVKLDGGDKKYSIGLDIGTNSVGWAVITDEYKVPSKKFKVLGNTDRHSIKKNLIGALLFDSGETAEATRLKRTARRRYTRRKNRICYLQEIFSNEMAKVDDSFFHRLEESFLVEEDKKHERHPIFGNIVDEVAYHEKYPTIYHLRKKLVDSTDKADLRLIYLALAHMIKFRGHFLIEGDLNPDNSDVDKLFIQLVQTYNQLFEENPINASGVDAKAILSARLSKSRRLENLIAQLPGEKKNGLFGNLIALSLGLTPNFKSNFDLAEDAKLQLSKDTYDDDLDNLLAQIGDQYADLFLAAKNLSDAILLSDILRVNTEITKAPLSASMIKRYDEHHQDLTLLKALVRQQLPEKYKEIFFDQSKNGYAGYIDGGASQEEFYKFIKPILEKMDGTEELLVKLNREDLLRKQRTFDNGSIPHQIHLGELHAILRRQEDFYPFLKDNREKIEKILTFRIPYYVGPLARGNSRFAWMTRKSEETITPWNFEEVVDKGASAQSFIERMTNFDKNLPNEKVLPKHSLLYEYFTVYNELTKVKYVTEGMRKPAFLSGEQKKAIVDLLFKTNRKVTVKQLKEDYFKKIECFDSVEISGVEDRFNASLGTYHDLLKIIKDKDFLDNEENEDILEDIVLTLTLFEDREMIEERLKTYAHLFDDKVMKQLKRRRYTGWGRLSRKLINGIRDKQSGKTILDFLKSDGFANRNFMQLIHDDSLTFKEDIQKAQVSGQGDSLHEHIANLAGSPAIKKGILQTVKVVDELVKVMGRHKPENIVIEMARENQTTQKGQKNSRERMKRIEEGIKELGSQILKEHPVENTQLQNEKLYLYYLQNGRDMYVDQELDINRLSDYDVDHIVPQSFLKDDSIDNKVLTRSDKARGKSDNVPSEEVVKKMKNYWRQLLNAKLITQRKFDNLTKAERGGLSELDKAGFIKRQLVETRQITKHVAQILDSRMNTKYDENDKLIREVKVITLKSKLVSDFRKDFQFYKVREINNYHHAHDAYLNAVVGTALIKKYPKLESEFVYGDYKVYDVRKMIAKSEQEIGKATAKYFFYSNIMNFFKTEITLANGEIRKRPLIETNGETGEIVWDKGRDFATVRKVLSMPQVNIVKKTEVQTGGFSKESILPKRNSDKLIARKKDWDPKKYGGFDSPTVAYSVLVVAKVEKGKSKKLKSVKELLGITIMERSSFEKNPIDFLEAKGYKEVKKDLIIKLPKYSLFELENGRKRMLASAGELQKGNELALPSKYVNFLYLASHYEKLKGSPEDNEQKQLFVEQHKHYLDEIIEQISEFSKRVILADANLDKVLSAYNKHRDKPIREQAENIIHLFTLTNLGAPAAFKYFDTTIDRKRYTSTKEVLDATLIHQSITGLYETRIDLSQLGGDGGGGGPAPGSSGGWVQEISDSRPMLHIYLNGRRFLGLLNTGADKTCIAGRDWPANWPIHQTESSLQGLGMACGVARSSQPLRWQHEDKSGIIHPFVIPTLPFTLWGRDIMKDIKVRLMTDSPDDSQDLMIGAIESNLFADQISWKSDQPVWLNQWPLKQEKLQALQQLVTEQLQLGHLEESNSPWNTPVFVIKKKSGKWRLLQDLRAVNATMHDMGALQPGLPSPVAPPKGWEIIIIDLQDCFFNIKLHPEDCKRFAFSVPSPNFKRPYQRFQWKVLPQGMKNSPTLCQKFVDKAILTVRDKYQDSYIVHYMDDILLAHPSRSIVDEILTSMIQALNKHGLVVSTEKIQKYDNLKYLGTHIQGDSVSYQKLQIRTDKLRTLNDFQKLLGNINWIRPFLKLTTGELKPLFEILNPDSNPISTRKLTPEACKALQLMNERLSTARVKRLDLSQPWSLCILKTEYTPTACLWQDGVVEWIHLPHISPKVITPYDIFCTQLIIKGRHRSKELFSKDPDYIVVPYTKVQFDLLLQEKEDWPISLLGFLGEVHFHLPKDPLLTFTLQTAIIFPHMTSTTPLEKGIVIFTDGSANGRSVTYIQGREPIIKENTQNTAQQAEIVAVITAFEEVSQPFNLYTDSKYVTGLFPEIETATLSPRTKIYTELKHLQRLIHKRQEKFYIGHIRGHTGLPGPLAQGNAYADSLTRILTAGKRTADGSEFEKRTADGSEFESPKKKAKVE

SEQ ID NO: 7377 - protein, 2085 aa, synthetic construct
MPAAKRVKLDGGDKKYSIGLDIGTNSVGWAVITDEYKVPSKKFKVLGNTDRHSIKKNLIGALLFDSGETAEATRLKRTARRRYTRRKNRICYLQEIFSNEMAKVDDSFFHRLEESFLVEEDKKHERHPIFGNIVDEVAYHEKYPTIYHLRKKLVDSTDKADLRLIYLALAHMIKFRGHFLIEGDLNPDNSDVDKLFIQLVQTYNQLFEENPINASGVDAKAILSARLSKSRRLENLIAQLPGEKKNGLFGNLIALSLGLTPNFKSNFDLAEDAKLQLSKDTYDDDLDNLLAQIGDQYADLFLAAKNLSDAILLSDILRVNTEITKAPLSASMIKRYDEHHQDLTLLKALVRQQLPEKYKEIFFDQSKNGYAGYIDGGASQEEFYKFIKPILEKMDGTEELLVKLNREDLLRKQRTFDNGSIPHQIHLGELHAILRRQEDFYPFLKDNREKIEKILTFRIPYYVGPLARGNSRFAWMTRKSEETITPWNFEEVVDKGASAQSFIERMTNFDKNLPNEKVLPKHSLLYEYFTVYNELTKVKYVTEGMRKPAFLSGEQKKAIVDLLFKTNRKVTVKQLKEDYFKKIECFDSVEISGVEDRFNASLGTYHDLLKIIKDKDFLDNEENEDILEDIVLTLTLFEDREMIEERLKTYAHLFDDKVMKQLKRRRYTGWGRLSRKLINGIRDKQSGKTILDFLKSDGFANRNFMQLIHDDSLTFKEDIQKAQVSGQGDSLHEHIANLAGSPAIKKGILQTVKVVDELVKVMGRHKPENIVIEMARENQTTQKGQKNSRERMKRIEEGIKELGSQILKEHPVENTQLQNEKLYLYYLQNGRDMYVDQELDINRLSDYDVDHIVPQSFLKDDSIDNKVLTRSDKARGKSDNVPSEEVVKKMKNYWRQLLNAKLITQRKFDNLTKAERGGLSELDKAGFIKRQLVETRQITKHVAQILDSRMNTKYDENDKLIREVKVITLKSKLVSDFRKDFQFYKVREINNYHHAHDAYLNAVVGTALIKKYPKLESEFVYGDYKVYDVRKMIAKSEQEIGKATAKYFFYSNIMNFFKTEITLANGEIRKRPLIETNGETGEIVWDKGRDFATVRKVLSMPQVNIVKKTEVQTGGFSKESILPKRNSDKLIARKKDWDPKKYGGFDSPTVAYSVLVVAKVEKGKSKKLKSVKELLGITIMERSSFEKNPIDFLEAKGYKEVKKDLIIKLPKYSLFELENGRKRMLASAGELQKGNELALPSKYVNFLYLASHYEKLKGSPEDNEQKQLFVEQHKHYLDEIIEQISEFSKRVILADANLDKVLSAYNKHRDKPIREQAENIIHLFTLTNLGAPAAFKYFDTTIDRKRYTSTKEVLDATLIHQSITGLYETRIDLSQLGGDGGGGGPAPGSSGGIPWLMKKPLQLTTLVPLQEYEERLLKQTMLTGSYKEKLQSLFLKYDALWQHWENQVGHRRIKPHHIATGTVNPRPQKQYPINPKAKASIQTVINDLLKQGVLIQQNSIMNTPVYPVPKPDGKWRMVLDYREVNKTIPLIAAQNQHSAGILSSIFRGKYKTTLDLSNGFWAHSITPESYWLTAFTWLGQQYCWTRLPQGFLNSPALFNADVVDLLKEVPNVQVYVDDIYISHDDPREHLEQLEKVFSLLLNAGYVVSLKKSEIAQHEVEFLGFNITKEGRGLTETFKQKLLNITPPRDLKQLQSILGLLNFARNFIPNFSELVKPLYNIIATAPGKYITWTTDNSQQLQNIISMLNSAENLEERNPEVRLIMKVNTSPSAGYIRFYNEFAKRPIMYLNYVYTKAEVKFTNTEKLLTTIHKGLIKALDLGMGQEILVYSPIVSMTKIQKTPLPERKALPIRWITWMSYLEDPRIQFHYDKTLPELQQVPTVTDDIIAKIKHPSEFSMVFYTDGSAIKHPNVNKSHNAGMGIAQVQFKPEFTVINTWSIPLGDHTAQLAEVAAVEFACKKALKIDGPVLIVTDSFYVAESVNKELPYWQSNGFFNNKKKPLKHVSKWKSIADCIQLKPDIIIIHEKGHQPTASTFHTEGNNLADKLATQGSYVVNAGKRTADGSEFEKRTADGSEFESPKKKAKVE

SEQ ID NO: 7378 - protein, 2092 aa, synthetic construct
MPAAKRVKLDGGDKKYSIGLDIGTNSVGWAVITDEYKVPSKKFKVLGNTDRHSIKKNLIGALLFDSGETAEATRLKRTARRRYTRRKNRICYLQEIFSNEMAKVDDSFFHRLEESFLVEEDKKHERHPIFGNIVDEVAYHEKYPTIYHLRKKLVDSTDKADLRLIYLALAHMIKFRGHFLIEGDLNPDNSDVDKLFIQLVQTYNQLFEENPINASGVDAKAILSARLSKSRRLENLIAQLPGEKKNGLFGNLIALSLGLTPNFKSNFDLAEDAKLQLSKDTYDDDLDNLLAQIGDQYADLFLAAKNLSDAILLSDILRVNTEITKAPLSASMIKRYDEHHQDLTLLKALVRQQLPEKYKEIFFDQSKNGYAGYIDGGASQEEFYKFIKPILEKMDGTEELLVKLNREDLLRKQRTFDNGSIPHQIHLGELHAILRRQEDFYPFLKDNREKIEKILTFRIPYYVGPLARGNSRFAWMTRKSEETITPWNFEEVVDKGASAQSFIERMTNFDKNLPNEKVLPKHSLLYEYFTVYNELTKVKYVTEGMRKPAFLSGEQKKAIVDLLFKTNRKVTVKQLKEDYFKKIECFDSVEISGVEDRFNASLGTYHDLLKIIKDKDFLDNEENEDILEDIVLTLTLFEDREMIEERLKTYAHLFDDKVMKQLKRRRYTGWGRLSRKLINGIRDKQSGKTILDFLKSDGFANRNFMQLIHDDSLTFKEDIQKAQVSGQGDSLHEHIANLAGSPAIKKGILQTVKVVDELVKVMGRHKPENIVIEMARENQTTQKGQKNSRERMKRIEEGIKELGSQILKEHPVENTQLQNEKLYLYYLQNGRDMYVDQELDINRLSDYDVDHIVPQSFLKDDSIDNKVLTRSDKARGKSDNVPSEEVVKKMKNYWRQLLNAKLITQRKFDNLTKAERGGLSELDKAGFIKRQLVETRQITKHVAQILDSRMNTKYDENDKLIREVKVITLKSKLVSDFRKDFQFYKVREINNYHHAHDAYLNAVVGTALIKKYPKLESEFVYGDYKVYDVRKMIAKSEQEIGKATAKYFFYSNIMNFFKTEITLANGEIRKRPLIETNGETGEIVWDKGRDFATVRKVLSMPQVNIVKKTEVQTGGFSKESILPKRNSDKLIARKKDWDPKKYGGFDSPTVAYSVLVVAKVEKGKSKKLKSVKELLGITIMERSSFEKNPIDFLEAKGYKEVKKDLIIKLPKYSLFELENGRKRMLASAGELQKGNELALPSKYVNFLYLASHYEKLKGSPEDNEQKQLFVEQHKHYLDEIIEQISEFSKRVILADANLDKVLSAYNKHRDKPIREQAENIIHLFTLTNLGAPAAFKYFDTTIDRKRYTSTKEVLDATLIHQSITGLYETRIDLSQLGGDGGGGGPAPGSSGGVLNLEEEYRLHEKPVPSSIDPSWLQLFPTVWAERAGMGLANQVPPVVVELRSGASPVAVRQYPMSKEAREGIRPHIQRFLDLGVLVPCQSPWNTPLLPVKKPGTNDYRPVQDLREINKRVQDIHPTVPNPYNLLSSLPPSHTWYSVLDLKDAFFCLKLHPNSQPLFAFEWRDPEKGNTGQLTWTRLPQGFKNSPTLFNEALHRDLAPFRALNPQVVLLQYVDDLLVAAPTYRDCKEGTQKLLQELSKLGYRVSAKKAQLCQKEVTYLGYLLKEGKRWLTPARKATVMKIPPPTTPRQVREFLGTAGFCRLWIPGFASLAAPLYPLTKPSIPFIWTEEHQKAFDRIKEALLSAPALALPDLTKPFTLYVDERAGVARGVLTQTLGPWRRPVAYLSKKLDPVASGWPTCLKAVAAVALLLKDADKLTLGQNVTVIASHSLESIVRQPPDRWMTNARMTHYQSLLLNERVSFAPPAVLNPATLLPVESEATPVHRCSEILAEETGTRRDLKDQPLPGVPAWYTDGSSFIAEGKRRAGAAIVDGKRTVWASSLPEGTSAQKAELVALTQALRLAEGKDINIYTDSRYAFATAHIHGAIYKQRGWLTSAGKDIKNKEEILALLEAIHLPKRVAIIHCPGHQKGNDPVATGNRRADEAAKQAALSTRVLAETTKPAGKRTADGSEFEKRTADGSEFESPKKKAKVE

SEQ ID NO: 7379 - protein, 2096 aa, synthetic construct
MPAAKRVKLDGGDKKYSIGLDIGTNSVGWAVITDEYKVPSKKFKVLGNTDRHSIKKNLIGALLFDSGETAEATRLKRTARRRYTRRKNRICYLQEIFSNEMAKVDDSFFHRLEESFLVEEDKKHERHPIFGNIVDEVAYHEKYPTIYHLRKKLVDSTDKADLRLIYLALAHMIKFRGHFLIEGDLNPDNSDVDKLFIQLVQTYNQLFEENPINASGVDAKAILSARLSKSRRLENLIAQLPGEKKNGLFGNLIALSLGLTPNFKSNFDLAEDAKLQLSKDTYDDDLDNLLAQIGDQYADLFLAAKNLSDAILLSDILRVNTEITKAPLSASMIKRYDEHHQDLTLLKALVRQQLPEKYKEIFFDQSKNGYAGYIDGGASQEEFYKFIKPILEKMDGTEELLVKLNREDLLRKQRTFDNGSIPHQIHLGELHAILRRQEDFYPFLKDNREKIEKILTFRIPYYVGPLARGNSRFAWMTRKSEETITPWNFEEVVDKGASAQSFIERMTNFDKNLPNEKVLPKHSLLYEYFTVYNELTKVKYVTEGMRKPAFLSGEQKKAIVDLLFKTNRKVTVKQLKEDYFKKIECFDSVEISGVEDRFNASLGTYHDLLKIIKDKDFLDNEENEDILEDIVLTLTLFEDREMIEERLKTYAHLFDDKVMKQLKRRRYTGWGRLSRKLINGIRDKQSGKTILDFLKSDGFANRNFMQLIHDDSLTFKEDIQKAQVSGQGDSLHEHIANLAGSPAIKKGILQTVKVVDELVKVMGRHKPENIVIEMARENQTTQKGQKNSRERMKRIEEGIKELGSQILKEHPVENTQLQNEKLYLYYLQNGRDMYVDQELDINRLSDYDVDHIVPQSFLKDDSIDNKVLTRSDKARGKSDNVPSEEVVKKMKNYWRQLLNAKLITQRKFDNLTKAERGGLSELDKAGFIKRQLVETRQITKHVAQILDSRMNTKYDENDKLIREVKVITLKSKLVSDFRKDFQFYKVREINNYHHAHDAYLNAVVGTALIKKYPKLESEFVYGDYKVYDVRKMIAKSEQEIGKATAKYFFYSNIMNFFKTEITLANGEIRKRPLIETNGETGEIVWDKGRDFATVRKVLSMPQVNIVKKTEVQTGGFSKESILPKRNSDKLIARKKDWDPKKYGGFDSPTVAYSVLVVAKVEKGKSKKLKSVKELLGITIMERSSFEKNPIDFLEAKGYKEVKKDLIIKLPKYSLFELENGRKRMLASAGELQKGNELALPSKYVNFLYLASHYEKLKGSPEDNEQKQLFVEQHKHYLDEIIEQISEFSKRVILADANLDKVLSAYNKHRDKPIREQAENIIHLFTLTNLGAPAAFKYFDTTIDRKRYTSTKEVLDATLIHQSITGLYETRIDLSQLGGDGGGSSGGGPAPGGTAPLEEEYRLFLEAPIQNVTLLEQWKREIPKVWAEINPPGLASTQAPIHVQLLSTALPVRVRQYPITLEAKRSLRETIRKFRAAGILRPVHSPWNTPLLPVRKSGTSEYRMVQDLREVNKRVETIHPTVPNPYTLLSLLPPDRIWYSVLDLKDAFFCIPLAPESQLIFAFEWADAEEGESGQLTWTRLPQGFKNSPTLFDEALNRDLQGFRLDHPSVSLLQYVDDLLIAADTQAACLSATRDLLMTLAELGYRVSGKKAQLCQEEVTYLGFKIHKGSRSLSNSRTQAILQIPVPKTKRQVREFLGTIGYCRLWIPGFAELAQPLYAATRGGNDPLVWGEKEEEAFQSLKLALTQPPALALPSLDKPFQLFVEETSGAAKGVLTQALGPWKRPVAYLSKRLDPVAAGWPRCLRAIAAAALLTREASKLTFGQDIEITSSHNLESLLRSPPDKWLTNARITQYQVLLLDPPRVRFKQTAALNPATLLPETDDTLPIHHCLDTLDSLTSTRPDLTDQPLAQAEATLFTDGSSYIRDGKRYAGAAVVTLDSVIWAEPLPIGTSAQKAELIALTKALEWSKDKSVNIYTDSRYAFATLHVHGMIYRERGLLTAGGKAIKNAPEILALLTAVWLPKRVAVMHCKGHQKDDAPTSTGNRRADEVAREVAIRPLSTQATISAGKRTADGSEFEKRTADGSEFESPKKKAKVE

SEQ ID NO: 7380 - protein, 2096 aa, synthetic construct
MPAAKRVKLDGGDKKYSIGLDIGTNSVGWAVITDEYKVPSKKFKVLGNTDRHSIKKNLIGALLFDSGETAEATRLKRTARRRYTRRKNRICYLQEIFSNEMAKVDDSFFHRLEESFLVEEDKKHERHPIFGNIVDEVAYHEKYPTIYHLRKKLVDSTDKADLRLIYLALAHMIKFRGHFLIEGDLNPDNSDVDKLFIQLVQTYNQLFEENPINASGVDAKAILSARLSKSRRLENLIAQLPGEKKNGLFGNLIALSLGLTPNFKSNFDLAEDAKLQLSKDTYDDDLDNLLAQIGDQYADLFLAAKNLSDAILLSDILRVNTEITKAPLSASMIKRYDEHHQDLTLLKALVRQQLPEKYKEIFFDQSKNGYAGYIDGGASQEEFYKFIKPILEKMDGTEELLVKLNREDLLRKQRTFDNGSIPHQIHLGELHAILRRQEDFYPFLKDNREKIEKILTFRIPYYVGPLARGNSRFAWMTRKSEETITPWNFEEVVDKGASAQSFIERMTNFDKNLPNEKVLPKHSLLYEYFTVYNELTKVKYVTEGMRKPAFLSGEQKKAIVDLLFKTNRKVTVKQLKEDYFKKIECFDSVEISGVEDRFNASLGTYHDLLKIIKDKDFLDNEENEDILEDIVLTLTLFEDREMIEERLKTYAHLFDDKVMKQLKRRRYTGWGRLSRKLINGIRDKQSGKTILDFLKSDGFANRNFMQLIHDDSLTFKEDIQKAQVSGQGDSLHEHIANLAGSPAIKKGILQTVKVVDELVKVMGRHKPENIVIEMARENQTTQKGQKNSRERMKRIEEGIKELGSQILKEHPVENTQLQNEKLYLYYLQNGRDMYVDQELDINRLSDYDVDHIVPQSFLKDDSIDNKVLTRSDKARGKSDNVPSEEVVKKMKNYWRQLLNAKLITQRKFDNLTKAERGGLSELDKAGFIKRQLVETRQITKHVAQILDSRMNTKYDENDKLIREVKVITLKSKLVSDFRKDFQFYKVREINNYHHAHDAYLNAVVGTALIKKYPKLESEFVYGDYKVYDVRKMIAKSEQEIGKATAKYFFYSNIMNFFKTEITLANGEIRKRPLIETNGETGEIVWDKGRDFATVRKVLSMPQVNIVKKTEVQTGGFSKESILPKRNSDKLIARKKDWDPKKYGGFDSPTVAYSVLVVAKVEKGKSKKLKSVKELLGITIMERSSFEKNPIDFLEAKGYKEVKKDLIIKLPKYSLFELENGRKRMLASAGELQKGNELALPSKYVNFLYLASHYEKLKGSPEDNEQKQLFVEQHKHYLDEIIEQISEFSKRVILADANLDKVLSAYNKHRDKPIREQAENIIHLFTLTNLGAPAAFKYFDTTIDRKRYTSTKEVLDATLIHQSITGLYETRIDLSQLGGDGGGSSGGGPAPGGTAPLEEEYRLFLEAPIQNVTLLEQWKREIPKVWAEINPPGLASTQAPIHVQLLSTALPVRVRQYPITLEAKRSLRETIRKFRAAGILRPVHSPWNTPLLPVRKSGTSEYRMVQDLREVNKRVETIHPTVPNPYTLLSLLPPDRIWYSVLDLKDAFFCIPLAPESQLIFAFEWADAEEGESGQLTWTRLPQGFKNSPTLFNEALNRDLQGFRLDHPSVSLLQYVDDLLIAADTQAACLSATRDLLMTLAELGYRVSGKKAQLCQEEVTYLGFKIHKGSRSLSNSRTQAILQIPVPKTKRQVREFLGTIGYCRLWIPGFAELAQPLYAATRPGNDPLVWGEKEEEAFQSLKLALTQPPALALPSLDKPFQLFVEETSGAAKGVLTQALGPWKRPVAYLSKRLDPVAAGWPRCLRAIAAAALLTREASKLTFGQDIEITSSHNLESLLRSPPDKWLTNARITQYQVLLLDPPRVRFKQTAALNPATLLPETDDTLPIHHCLDTLDSLTSTRPDLTDQPLAQAEATLFTDGSSYIRDGKRYAGAAVVTLDSVIWAEPLPIGTSAQKAELIALTKALEWSKDKSVNIYTDSRYAFATLHVHGMIYRERGWLTAGGKAIKNAPEILALLTAVWLPKRVAVMHCKGHQKDDAPTSTGNRRADEVAREVAIRPLSTQATISAGKRTADGSEFEKRTADGSEFESPKKKAKVE

SEQ ID NO: 7381 - protein, 2096 aa, synthetic construct
MPAAKRVKLDGGDKKYSIGLDIGTNSVGWAVITDEYKVPSKKFKVLGNTDRHSIKKNLIGALLFDSGETAEATRLKRTARRRYTRRKNRICYLQEIFSNEMAKVDDSFFHRLEESFLVEEDKKHERHPIFGNIVDEVAYHEKYPTIYHLRKKLVDSTDKADLRLIYLALAHMIKFRGHFLIEGDLNPDNSDVDKLFIQLVQTYNQLFEENPINASGVDAKAILSARLSKSRRLENLIAQLPGEKKNGLFGNLIALSLGLTPNFKSNFDLAEDAKLQLSKDTYDDDLDNLLAQIGDQYADLFLAAKNLSDAILLSDILRVNTEITKAPLSASMIKRYDEHHQDLTLLKALVRQQLPEKYKEIFFDQSKNGYAGYIDGGASQEEFYKFIKPILEKMDGTEELLVKLNREDLLRKQRTFDNGSIPHQIHLGELHAILRRQEDFYPFLKDNREKIEKILTFRIPYYVGPLARGNSRFAWMTRKSEETITPWNFEEVVDKGASAQSFIERMTNFDKNLPNEKVLPKHSLLYEYFTVYNELTKVKYVTEGMRKPAFLSGEQKKAIVDLLFKTNRKVTVKQLKEDYFKKIECFDSVEISGVEDRFNASLGTYHDLLKIIKDKDFLDNEENEDILEDIVLTLTLFEDREMIEERLKTYAHLFDDKVMKQLKRRRYTGWGRLSRKLINGIRDKQSGKTILDFLKSDGFANRNFMQLIHDDSLTFKEDIQKAQVSGQGDSLHEHIANLAGSPAIKKGILQTVKVVDELVKVMGRHKPENIVIEMARENQTTQKGQKNSRERMKRIEEGIKELGSQILKEHPVENTQLQNEKLYLYYLQNGRDMYVDQELDINRLSDYDVDHIVPQSFLKDDSIDNKVLTRSDKARGKSDNVPSEEVVKKMKNYWRQLLNAKLITQRKFDNLTKAERGGLSELDKAGFIKRQLVETRQITKHVAQILDSRMNTKYDENDKLIREVKVITLKSKLVSDFRKDFQFYKVREINNYHHAHDAYLNAVVGTALIKKYPKLESEFVYGDYKVYDVRKMIAKSEQEIGKATAKYFFYSNIMNFFKTEITLANGEIRKRPLIETNGETGEIVWDKGRDFATVRKVLSMPQVNIVKKTEVQTGGFSKESILPKRNSDKLIARKKDWDPKKYGGFDSPTVAYSVLVVAKVEKGKSKKLKSVKELLGITIMERSSFEKNPIDFLEAKGYKEVKKDLIIKLPKYSLFELENGRKRMLASAGELQKGNELALPSKYVNFLYLASHYEKLKGSPEDNEQKQLFVEQHKHYLDEIIEQISEFSKRVILADANLDKVLSAYNKHRDKPIREQAENIIHLFTLTNLGAPAAFKYFDTTIDRKRYTSTKEVLDATLIHQSITGLYETRIDLSQLGGDGGGSSGGGPAPGGTAPLEEEYRLFLEAPIQNVTLLEQWKREIPKVWAEINPPGLASTQAPIHVQLLSTALPVRVRQYPITLEAKRSLRETIRKFRAAGILRPVHSPWNTPLLPVRKSGTSEYRMVQDLREVNKRVETIHPTVPNPYTLLSLLPPDRIWYSVLDLKDAFFCIPLAPESQLIFAFEWADAEEGESGQLTWTRLPQGFKNSPTLFNEALNRDLQGFRLDHPSVSLLQYVDDLLIAADTQAACLSATRDLLMTLAELGYRVSGKKAQLCQEEVTYLGFKIHKGSRSLSNSRTQAILQIPVPKTKRQVREFLGKIGYCRLFIPGFAELAQPLYAATRPGNDPLVWGEKEEEAFQSLKLALTQPPALALPSLDKPFQLFVEETSGAAKGVLTQALGPWKRPVAYLSKRLDPVAAGWPRCLRAIAAAALLTREASKLTFGQDIEITSSHNLESLLRSPPDKWLTNARITQYQVLLLDPPRVRFKQTAALNPATLLPETDDTLPIHHCLDTLDSLTSTRPDLTDQPLAQAEATLFTDGSSYIRDGKRYAGAAVVTLDSVIWAEPLPIGTSAQKAELIALTKALEWSKDKSVNIYTDSRYAFATLHVHGMIYRERGWLTAGGKAIKNAPEILALLTAVWLPKRVAVMHCKGHQKDDAPTSTGNRRADEVAREVAIRPLSTQATISAGKRTADGSEFEKRTADGSEFESPKKKAKVE

SEQ ID NO: 7382 - protein, 2100 aa, synthetic construct
MPAAKRVKLDGGDKKYSIGLDIGTNSVGWAVITDEYKVPSKKFKVLGNTDRHSIKKNLIGALLFDSGETAEATRLKRTARRRYTRRKNRICYLQEIFSNEMAKVDDSFFHRLEESFLVEEDKKHERHPIFGNIVDEVAYHEKYPTIYHLRKKLVDSTDKADLRLIYLALAHMIKFRGHFLIEGDLNPDNSDVDKLFIQLVQTYNQLFEENPINASGVDAKAILSARLSKSRRLENLIAQLPGEKKNGLFGNLIALSLGLTPNFKSNFDLAEDAKLQLSKDTYDDDLDNLLAQIGDQYADLFLAAKNLSDAILLSDILRVNTEITKAPLSASMIKRYDEHHQDLTLLKALVRQQLPEKYKEIFFDQSKNGYAGYIDGGASQEEFYKFIKPILEKMDGTEELLVKLNREDLLRKQRTFDNGSIPHQIHLGELHAILRRQEDFYPFLKDNREKIEKILTFRIPYYVGPLARGNSRFAWMTRKSEETITPWNFEEVVDKGASAQSFIERMTNFDKNLPNEKVLPKHSLLYEYFTVYNELTKVKYVTEGMRKPAFLSGEQKKAIVDLLFKTNRKVTVKQLKEDYFKKIECFDSVEISGVEDRFNASLGTYHDLLKIIKDKDFLDNEENEDILEDIVLTLTLFEDREMIEERLKTYAHLFDDKVMKQLKRRRYTGWGRLSRKLINGIRDKQSGKTILDFLKSDGFANRNFMQLIHDDSLTFKEDIQKAQVSGQGDSLHEHIANLAGSPAIKKGILQTVKVVDELVKVMGRHKPENIVIEMARENQTTQKGQKNSRERMKRIEEGIKELGSQILKEHPVENTQLQNEKLYLYYLQNGRDMYVDQELDINRLSDYDVDHIVPQSFLKDDSIDNKVLTRSDKARGKSDNVPSEEVVKKMKNYWRQLLNAKLITQRKFDNLTKAERGGLSELDKAGFIKRQLVETRQITKHVAQILDSRMNTKYDENDKLIREVKVITLKSKLVSDFRKDFQFYKVREINNYHHAHDAYLNAVVGTALIKKYPKLESEFVYGDYKVYDVRKMIAKSEQEIGKATAKYFFYSNIMNFFKTEITLANGEIRKRPLIETNGETGEIVWDKGRDFATVRKVLSMPQVNIVKKTEVQTGGFSKESILPKRNSDKLIARKKDWDPKKYGGFDSPTVAYSVLVVAKVEKGKSKKLKSVKELLGITIMERSSFEKNPIDFLEAKGYKEVKKDLIIKLPKYSLFELENGRKRMLASAGELQKGNELALPSKYVNFLYLASHYEKLKGSPEDNEQKQLFVEQHKHYLDEIIEQISEFSKRVILADANLDKVLSAYNKHRDKPIREQAENIIHLFTLTNLGAPAAFKYFDTTIDRKRYTSTKEVLDATLIHQSITGLYETRIDLSQLGGDGGGSSGGGPAPGGTVSLQDEHRLFDIPVTTSLPDVWLQDFPQAWAETGGLGRAKCQAPIIIDLKPTAVPVSIKQYPMSLEAHMGIRQHIIKFLELGVLRPCRSPWNTPLLPVKKPGTQDYRPVQDLREINKRTVDIHPTVPNPYNLLSTLKPDYSWYTVLDLKDAFFCLPLAPQSQELFAFEWKDPERGISGQLTWTRLPQGFKNSPTLFNEALHRDLTDFRTQHPEVTLLQYVDDLLLAAPTKKACTQGTRHLLQELGEKGYRASAKKAQICQTKVTYLGYILSEGKRWLTPGRIETVARIPPPRNPREVREFLGTAGFCRLWIPGFAELAAPLYALTKPSTPFTWQTEHQLAFEALKKALLSAPALGLPDTSKPFTLFLDERQGIAKGVLTQKLGPWKRPVAYLSKKLDPVAAGWPPCLRIMAATAMLVKDSAKLTLGQPLTVITPHTLEAIVRQPPDRWITNARLTHYQALLLDTDRVQFGPPVTLNPATLLPVPENQPSPHDCRQVLAETHGTREDLKDQELPDADHTWYTDGSSYLDSGTRRAGAAVVDGHNTIWAQSLPPGTSAQKAELIALTKALELSKGKKANIYTDSRYAFATAHTHGSIYERRGWLTSEGKEIKNKAEIIALLKALFLPQEVAIIHCPGHQKGQDPVAVGNRQADRVARQAAMAEVLTLATEPDNTSHITAGKRTADGSEFEKRTADGSEFESPKKKAKVE

SEQ ID NO: 7383 - protein, 2085 aa, synthetic construct
MPAAKRVKLDGGDKKYSIGLDIGTNSVGWAVITDEYKVPSKKFKVLGNTDRHSIKKNLIGALLFDSGETAEATRLKRTARRRYTRRKNRICYLQEIFSNEMAKVDDSFFHRLEESFLVEEDKKHERHPIFGNIVDEVAYHEKYPTIYHLRKKLVDSTDKADLRLIYLALAHMIKFRGHFLIEGDLNPDNSDVDKLFIQLVQTYNQLFEENPINASGVDAKAILSARLSKSRRLENLIAQLPGEKKNGLFGNLIALSLGLTPNFKSNFDLAEDAKLQLSKDTYDDDLDNLLAQIGDQYADLFLAAKNLSDAILLSDILRVNTEITKAPLSASMIKRYDEHHQDLTLLKALVRQQLPEKYKEIFFDQSKNGYAGYIDGGASQEEFYKFIKPILEKMDGTEELLVKLNREDLLRKQRTFDNGSIPHQIHLGELHAILRRQEDFYPFLKDNREKIEKILTFRIPYYVGPLARGNSRFAWMTRKSEETITPWNFEEVVDKGASAQSFIERMTNFDKNLPNEKVLPKHSLLYEYFTVYNELTKVKYVTEGMRKPAFLSGEQKKAIVDLLFKTNRKVTVKQLKEDYFKKIECFDSVEISGVEDRFNASLGTYHDLLKIIKDKDFLDNEENEDILEDIVLTLTLFEDREMIEERLKTYAHLFDDKVMKQLKRRRYTGWGRLSRKLINGIRDKQSGKTILDFLKSDGFANRNFMQLIHDDSLTFKEDIQKAQVSGQGDSLHEHIANLAGSPAIKKGILQTVKVVDELVKVMGRHKPENIVIEMARENQTTQKGQKNSRERMKRIEEGIKELGSQILKEHPVENTQLQNEKLYLYYLQNGRDMYVDQELDINRLSDYDVDHIVPQSFLKDDSIDNKVLTRSDKARGKSDNVPSEEVVKKMKNYWRQLLNAKLITQRKFDNLTKAERGGLSELDKAGFIKRQLVETRQITKHVAQILDSRMNTKYDENDKLIREVKVITLKSKLVSDFRKDFQFYKVREINNYHHAHDAYLNAVVGTALIKKYPKLESEFVYGDYKVYDVRKMIAKSEQEIGKATAKYFFYSNIMNFFKTEITLANGEIRKRPLIETNGETGEIVWDKGRDFATVRKVLSMPQVNIVKKTEVQTGGFSKESILPKRNSDKLIARKKDWDPKKYGGFDSPTVAYSVLVVAKVEKGKSKKLKSVKELLGITIMERSSFEKNPIDFLEAKGYKEVKKDLIIKLPKYSLFELENGRKRMLASAGELQKGNELALPSKYVNFLYLASHYEKLKGSPEDNEQKQLFVEQHKHYLDEIIEQISEFSKRVILADANLDKVLSAYNKHRDKPIREQAENIIHLFTLTNLGAPAAFKYFDTTIDRKRYTSTKEVLDATLIHQSITGLYETRIDLSQLGGDGGGSSGGGPAPGGVPWILKKPLELTIKLDLEEQQGTLLNNSILSKKGKEELKQLFEKYSALWQSWENQVGHRRIRPHKIATGTVKPTPQKQYHINPKAKPDIQIVINDLLKQGVLIQKESTMNTPVYPVPKPNGRWRMVLDYRAVNKVTPLIAVQNQHSYGILGSLFKGRYKTTIDLSNGFWAHPIVPEDYWITAFTWQGKQYCWTVLPQGFLNSPGLFTGDVVDLLQGIPNVEVYVDDVYISHDSEKEHLEYLDILFNRLKEAGYIISLKKSNIANSIVDFLGFQITNEGRGLTDTFKEKLENITAPTTLKQLQSILGLLNFARNFIPDFTELIAPLYALIPKSTKNYVPWQIEHSTTLETLITKLNGAEYLQGRKGDKTLIMKVNASYTTGYIRYYNEGEKKPISYVSIVFSKTELKFTELEKLLTTVHKGLLKALDLSMGQNIHVYSPIVSMQNIQKTPQTAKKALASRWLSWLSYLEDPRIRFFYDPQMPALKDLPAVDTGKDNKKHPSNFQHIFYTDGSAITSPTKEGHLNAGMGIVYFINKDGNLQKQQEWSISLGNHTAQFAEIAAFEFALKKCLPLGGNILVVTDSNYVAKAYNEELDVWASNGFVNNRKKPLKHISKWKSVADLKRLRPDVVVTHEPGHQKLDSSPHAYGNNLADQLATQASFKVHAGKRTADGSEFEKRTADGSEFESPKKKAKVE

SEQ ID NO: 7384 - protein, 2093 aa, synthetic construct
MPAAKRVKLDGGDKKYSIGLDIGTNSVGWAVITDEYKVPSKKFKVLGNTDRHSIKKNLIGALLFDSGETAEATRLKRTARRRYTRRKNRICYLQEIFSNEMAKVDDSFFHRLEESFLVEEDKKHERHPIFGNIVDEVAYHEKYPTIYHLRKKLVDSTDKADLRLIYLALAHMIKFRGHFLIEGDLNPDNSDVDKLFIQLVQTYNQLFEENPINASGVDAKAILSARLSKSRRLENLIAQLPGEKKNGLFGNLIALSLGLTPNFKSNFDLAEDAKLQLSKDTYDDDLDNLLAQIGDQYADLFLAAKNLSDAILLSDILRVNTEITKAPLSASMIKRYDEHHQDLTLLKALVRQQLPEKYKEIFFDQSKNGYAGYIDGGASQEEFYKFIKPILEKMDGTEELLVKLNREDLLRKQRTFDNGSIPHQIHLGELHAILRRQEDFYPFLKDNREKIEKILTFRIPYYVGPLARGNSRFAWMTRKSEETITPWNFEEVVDKGASAQSFIERMTNFDKNLPNEKVLPKHSLLYEYFTVYNELTKVKYVTEGMRKPAFLSGEQKKAIVDLLFKTNRKVTVKQLKEDYFKKIECFDSVEISGVEDRFNASLGTYHDLLKIIKDKDFLDNEENEDILEDIVLTLTLFEDREMIEERLKTYAHLFDDKVMKQLKRRRYTGWGRLSRKLINGIRDKQSGKTILDFLKSDGFANRNFMQLIHDDSLTFKEDIQKAQVSGQGDSLHEHIANLAGSPAIKKGILQTVKVVDELVKVMGRHKPENIVIEMARENQTTQKGQKNSRERMKRIEEGIKELGSQILKEHPVENTQLQNEKLYLYYLQNGRDMYVDQELDINRLSDYDVDHIVPQSFLKDDSIDNKVLTRSDKARGKSDNVPSEEVVKKMKNYWRQLLNAKLITQRKFDNLTKAERGGLSELDKAGFIKRQLVETRQITKHVAQILDSRMNTKYDENDKLIREVKVITLKSKLVSDFRKDFQFYKVREINNYHHAHDAYLNAVVGTALIKKYPKLESEFVYGDYKVYDVRKMIAKSEQEIGKATAKYFFYSNIMNFFKTEITLANGEIRKRPLIETNGETGEIVWDKGRDFATVRKVLSMPQVNIVKKTEVQTGGFSKESILPKRNSDKLIARKKDWDPKKYGGFDSPTVAYSVLVVAKVEKGKSKKLKSVKELLGITIMERSSFEKNPIDFLEAKGYKEVKKDLIIKLPKYSLFELENGRKRMLASAGELQKGNELALPSKYVNFLYLASHYEKLKGSPEDNEQKQLFVEQHKHYLDEIIEQISEFSKRVILADANLDKVLSAYNKHRDKPIREQAENIIHLFTLTNLGAPAAFKYFDTTIDRKRYTSTKEVLDATLIHQSITGLYETRIDLSQLGGDGGGSSGGGPAPGGTLQLEEEYRLFEPESTQKQEMDIWLKNFPQAWAETGGMGTAHCQAPVLIQLKATATPISIRQYPMPHEAYQGIKPHIRRMLDQGILKPCQSPWNTPLLPVKKPGTEDYRPVQDLREVNKRVEDIHPTVPNPYNLLSTLPPSHPWYTVLDLKDAFFCLRLHSESQLLFAFEWRDPEIGLSGQLTWTRLPQGFKNSPTLFNEALHSDLADFRVRYPALVLLQYVDDLLLAAATRTECLEGTKALLETLGNKGYRASAKKAQICLQEVTYLGYSLKDGQRWLTKARKEAILSIPVPKNSRQVREFLGTAGYCRLWIPGFAELAAPLYPLTRPGTLFQWGTEQQLAFEDIKKALLSSPALGLPDITKPFELFIDENSGFAKGVLVQKLGPWKRPVAYLSKKLDTVASGWPPCLRMVAAIAILVKDAGKLTLGQPLTILTSHPVEALVRQPPNKWLSNARMTHYQAMLLDAERVHFGPTVSLNPATLLPLPSGGNHHDCLQILAETHGTRPDLTDQPLPDADLTWYTDGSSFIRNGEREAGAAVTTESEVIWAAPLPPGTSAQRAELIALTQALKMAEGKKLTVYTDSRYAFATTHVHGEIYRRRGWLTSEGKEIKNKNEILALLEALFLPKRLSIIHCPGHQKGDSPQAKGNRLADDTAKKAATETHSSLTVLPAGKRTADGSEFEKRTADGSEFESPKKKAKVE

SEQ ID NO: 7385 - protein, 2174 aa, synthetic construct
MPAAKRVKLDGGDKKYSIGLDIGTNSVGWAVITDEYKVPSKKFKVLGNTDRHSIKKNLIGALLFDSGETAEATRLKRTARRRYTRRKNRICYLQEIFSNEMAKVDDSFFHRLEESFLVEEDKKHERHPIFGNIVDEVAYHEKYPTIYHLRKKLVDSTDKADLRLIYLALAHMIKFRGHFLIEGDLNPDNSDVDKLFIQLVQTYNQLFEENPINASGVDAKAILSARLSKSRRLENLIAQLPGEKKNGLFGNLIALSLGLTPNFKSNFDLAEDAKLQLSKDTYDDDLDNLLAQIGDQYADLFLAAKNLSDAILLSDILRVNTEITKAPLSASMIKRYDEHHQDLTLLKALVRQQLPEKYKEIFFDQSKNGYAGYIDGGASQEEFYKFIKPILEKMDGTEELLVKLNREDLLRKQRTFDNGSIPHQIHLGELHAILRRQEDFYPFLKDNREKIEKILTFRIPYYVGPLARGNSRFAWMTRKSEETITPWNFEEVVDKGASAQSFIERMTNFDKNLPNEKVLPKHSLLYEYFTVYNELTKVKYVTEGMRKPAFLSGEQKKAIVDLLFKTNRKVTVKQLKEDYFKKIECFDSVEISGVEDRFNASLGTYHDLLKIIKDKDFLDNEENEDILEDIVLTLTLFEDREMIEERLKTYAHLFDDKVMKQLKRRRYTGWGRLSRKLINGIRDKQSGKTILDFLKSDGFANRNFMQLIHDDSLTFKEDIQKAQVSGQGDSLHEHIANLAGSPAIKKGILQTVKVVDELVKVMGRHKPENIVIEMARENQTTQKGQKNSRERMKRIEEGIKELGSQILKEHPVENTQLQNEKLYLYYLQNGRDMYVDQELDINRLSDYDVDHIVPQSFLKDDSIDNKVLTRSDKARGKSDNVPSEEVVKKMKNYWRQLLNAKLITQRKFDNLTKAERGGLSELDKAGFIKRQLVETRQITKHVAQILDSRMNTKYDENDKLIREVKVITLKSKLVSDFRKDFQFYKVREINNYHHAHDAYLNAVVGTALIKKYPKLESEFVYGDYKVYDVRKMIAKSEQEIGKATAKYFFYSNIMNFFKTEITLANGEIRKRPLIETNGETGEIVWDKGRDFATVRKVLSMPQVNIVKKTEVQTGGFSKESILPKRNSDKLIARKKDWDPKKYGGFDSPTVAYSVLVVAKVEKGKSKKLKSVKELLGITIMERSSFEKNPIDFLEAKGYKEVKKDLIIKLPKYSLFELENGRKRMLASAGELQKGNELALPSKYVNFLYLASHYEKLKGSPEDNEQKQLFVEQHKHYLDEIIEQISEFSKRVILADANLDKVLSAYNKHRDKPIREQAENIIHLFTLTNLGAPAAFKYFDTTIDRKRYTSTKEVLDATLIHQSITGLYETRIDLSQLGGDGGGSSGGGPAPGGMNPLQLLQPLPAEIKGTKLLAHWNSGATITCIPESFLEDEQPIKKTLIKTIHGEKQQNVYYVTFKVKGRKVEAEVIASPYEYILLSPTDVPWLTQQPLQLTILVPLQEYQEKILSKTALPEDQKQQLKTLFVKYDNLWQHWENQVGHRKIRPHNIATGDYPPRPQKQYPINPKAKPSIQIVIDDLLKQGVLTPQNSTMNTPVYPVPKPDGRWRMVLDYREVNKTIPLTAAQNQHSAGILATIVRQKYKTTLDLANGFWAHPITPESYWLTAFTWQGKQYCWTRLPQGFLNSPALFNADVVDLLKEIPNVQVYVDDIYLSHDDPKEHVQQLEKVFQILLQAGYVVSLKKSEIGQKTVEFLGFNITKEGRGLTDTFKTKLLNITPPKDLKQLQSILGLLNFARNFIPNFAELVQPLYNLIAPAKGKYIEWSEENTKQLNMVIEALNTASNLEERLPEQRLVIKVNTSPSAGYVRYYNETGKKPIMYLNYVFSKAELKFSMLEKLLTTMHKALIKAMDLAMGQEILVYSPIVSMTKIQKTPLPERKALPIRWITWMTYLEDPRIQFHYDKTLPELKHIPDVYTSSQSPVKHPSQYEGVFYTDGSAIKSPDPTKSNNAGMGIVHATYKPEYQVLNQWSIPLGNHTAQMAEIAAVEFACKKALKIPGPVLVITDSFYVAESANKELPYWKSNGFVNNKKKPLKHISKWKSIAECLSMKPDITIQHEKGISLQIPVFILKGNALADKLATQGSYVVNAGKRTADGSEFEKRTADGSEFESPKKKAKVE

SEQ ID NO: 7386 - protein, 2125 aa, synthetic construct
MPAAKRVKLDGGDKKYSIGLDIGTNSVGWAVITDEYKVPSKKFKVLGNTDRHSIKKNLIGALLFDSGETAEATRLKRTARRRYTRRKNRICYLQEIFSNEMAKVDDSFFHRLEESFLVEEDKKHERHPIFGNIVDEVAYHEKYPTIYHLRKKLVDSTDKADLRLIYLALAHMIKFRGHFLIEGDLNPDNSDVDKLFIQLVQTYNQLFEENPINASGVDAKAILSARLSKSRRLENLIAQLPGEKKNGLFGNLIALSLGLTPNFKSNFDLAEDAKLQLSKDTYDDDLDNLLAQIGDQYADLFLAAKNLSDAILLSDILRVNTEITKAPLSASMIKRYDEHHQDLTLLKALVRQQLPEKYKEIFFDQSKNGYAGYIDGGASQEEFYKFIKPILEKMDGTEELLVKLNREDLLRKQRTFDNGSIPHQIHLGELHAILRRQEDFYPFLKDNREKIEKILTFRIPYYVGPLARGNSRFAWMTRKSEETITPWNFEEVVDKGASAQSFIERMTNFDKNLPNEKVLPKHSLLYEYFTVYNELTKVKYVTEGMRKPAFLSGEQKKAIVDLLFKTNRKVTVKQLKEDYFKKIECFDSVEISGVEDRFNASLGTYHDLLKIIKDKDFLDNEENEDILEDIVLTLTLFEDREMIEERLKTYAHLFDDKVMKQLKRRRYTGWGRLSRKLINGIRDKQSGKTILDFLKSDGFANRNFMQLIHDDSLTFKEDIQKAQVSGQGDSLHEHIANLAGSPAIKKGILQTVKVVDELVKVMGRHKPENIVIEMARENQTTQKGQKNSRERMKRIEEGIKELGSQILKEHPVENTQLQNEKLYLYYLQNGRDMYVDQELDINRLSDYDVDHIVPQSFLKDDSIDNKVLTRSDKARGKSDNVPSEEVVKKMKNYWRQLLNAKLITQRKFDNLTKAERGGLSELDKAGFIKRQLVETRQITKHVAQILDSRMNTKYDENDKLIREVKVITLKSKLVSDFRKDFQFYKVREINNYHHAHDAYLNAVVGTALIKKYPKLESEFVYGDYKVYDVRKMIAKSEQEIGKATAKYFFYSNIMNFFKTEITLANGEIRKRPLIETNGETGEIVWDKGRDFATVRKVLSMPQVNIVKKTEVQTGGFSKESILPKRNSDKLIARKKDWDPKKYGGFDSPTVAYSVLVVAKVEKGKSKKLKSVKELLGITIMERSSFEKNPIDFLEAKGYKEVKKDLIIKLPKYSLFELENGRKRMLASAGELQKGNELALPSKYVNFLYLASHYEKLKGSPEDNEQKQLFVEQHKHYLDEIIEQISEFSKRVILADANLDKVLSAYNKHRDKPIREQAENIIHLFTLTNLGAPAAFKYFDTTIDRKRYTSTKEVLDATLIHQSITGLYETRIDLSQLGGDGGGSSGGGPAPGGLLGRDLLTKLKAQIQFSTEGPQVTWEDRPAMCLVLNLEEEYRLHEKPVPPSIDPSWLQLFPMVWAEKAGMGLANQVPPVVVELKSDASPVAVRQYPMSKEAREGIRPHIQRFLDLGILVPCQSPWNTPLLPVKKPGTNDYRPVQDLREVNKRVQDIHPTVPNPYNLLSSLPPSHTWYSVLDLKDAFFCLKLHPNSQPLFAFEWRDPEKGNTGQLTWTRLPQGFKNSPTLFNEALHRDLASFRALNPQVVMLQYVDDLLVAAPTYRDCKEGTRRLLQELSKLGYRVSAKKAQLCREEVTYLGYLLKGGKRWLTPARKATVMKIPTPTTPRQVREFLGTAGFCRLWIPGFASLAAPLYPLTRPKVPFTWTEAHQEAFGRIKEALLSAPALALPDLTKPFALYVDEKEGVARGVLTQTLGPWRRPVAYLSKKLDPVASGWPTCLKAIAAVALLLKDADKLTLGQNVLVIAPHNLESIVRQPPDRWMTNARMTHYQSLLLNERVSFAPPAILNPATLLPVESDDTPIHICSEILAEETGTRPDLRDQPLPGVPAWYTDGSSFIMDGRRQAGAAIVDNKRTVWASNLPEGTSAQKAELIALTQALRLAEGKSINIYTDSRYAFATAHVHGAIYKQRGWLTSAGKDIKNKEEILALLEAIHLPKRVAIIHCPGHQRGTDPVATGNRKADEAAKQAAQSTRILTETTKNAGKRTADGSEFEKRTADGSEFESPKKKAKVE

SEQ ID NO: 7387 - protein, 2216 aa, synthetic construct
MPAAKRVKLDGGDKKYSIGLDIGTNSVGWAVITDEYKVPSKKFKVLGNTDRHSIKKNLIGALLFDSGETAEATRLKRTARRRYTRRKNRICYLQEIFSNEMAKVDDSFFHRLEESFLVEEDKKHERHPIFGNIVDEVAYHEKYPTIYHLRKKLVDSTDKADLRLIYLALAHMIKFRGHFLIEGDLNPDNSDVDKLFIQLVQTYNQLFEENPINASGVDAKAILSARLSKSRRLENLIAQLPGEKKNGLFGNLIALSLGLTPNFKSNFDLAEDAKLQLSKDTYDDDLDNLLAQIGDQYADLFLAAKNLSDAILLSDILRVNTEITKAPLSASMIKRYDEHHQDLTLLKALVRQQLPEKYKEIFFDQSKNGYAGYIDGGASQEEFYKFIKPILEKMDGTEELLVKLNREDLLRKQRTFDNGSIPHQIHLGELHAILRRQEDFYPFLKDNREKIEKILTFRIPYYVGPLARGNSRFAWMTRKSEETITPWNFEEVVDKGASAQSFIERMTNFDKNLPNEKVLPKHSLLYEYFTVYNELTKVKYVTEGMRKPAFLSGEQKKAIVDLLFKTNRKVTVKQLKEDYFKKIECFDSVEISGVEDRFNASLGTYHDLLKIIKDKDFLDNEENEDILEDIVLTLTLFEDREMIEERLKTYAHLFDDKVMKQLKRRRYTGWGRLSRKLINGIRDKQSGKTILDFLKSDGFANRNFMQLIHDDSLTFKEDIQKAQVSGQGDSLHEHIANLAGSPAIKKGILQTVKVVDELVKVMGRHKPENIVIEMARENQTTQKGQKNSRERMKRIEEGIKELGSQILKEHPVENTQLQNEKLYLYYLQNGRDMYVDQELDINRLSDYDVDHIVPQSFLKDDSIDNKVLTRSDKARGKSDNVPSEEVVKKMKNYWRQLLNAKLITQRKFDNLTKAERGGLSELDKAGFIKRQLVETRQITKHVAQILDSRMNTKYDENDKLIREVKVITLKSKLVSDFRKDFQFYKVREINNYHHAHDAYLNAVVGTALIKKYPKLESEFVYGDYKVYDVRKMIAKSEQEIGKATAKYFFYSNIMNFFKTEITLANGEIRKRPLIETNGETGEIVWDKGRDFATVRKVLSMPQVNIVKKTEVQTGGFSKESILPKRNSDKLIARKKDWDPKKYGGFDSPTVAYSVLVVAKVEKGKSKKLKSVKELLGITIMERSSFEKNPIDFLEAKGYKEVKKDLIIKLPKYSLFELENGRKRMLASAGELQKGNELALPSKYVNFLYLASHYEKLKGSPEDNEQKQLFVEQHKHYLDEIIEQISEFSKRVILADANLDKVLSAYNKHRDKPIREQAENIIHLFTLTNLGAPAAFKYFDTTIDRKRYTSTKEVLDATLIHQSITGLYETRIDLSQLGGDGGGSSGGGPAPGGTLGDQGSRGSDPLPEPRVTLTVEGIPTEFLVNTGAEHSVLTKPMGKMGSKRTVVAGATGSKVYPWTTKRLLKIGQKQVTHSFLVIPECPAPLLGRDLLTKLKAQIQFSTEGPQVTWEDRPAMCLVLNLEEEYRLHEKPVPPSIDPSWLQLFPMVWAEKAGMGLANQVPPVVVELKSDASPVAVRQYPMSKEAREGIRPHIQRFLDLGILVPCQSPWNTPLLPVKKPGTNDYRPVQDLREVNKRVQDIHPTVPNPYNLLSSLPPSHTWYSVLDLKDAFFCLKLHPNSQPLFAFEWRDPEKGNTGQLTWTRLPQGFKNSPTLFNEALHRDLASFRALNPQVVMLQYVDDLLVAAPTYRDCKEGTRRLLQELSKLGYRVSAKKAQLCREEVTYLGYLLKGGKRWLTPARKATVMKIPTPTTPRQVREFLGTAGFCRLWIPGFASLAAPLYPLTRPKVPFTWTEAHQEAFGRIKEALLSAPALALPDLTKPFALYVDEKEGVARGVLTQTLGPWRRPVAYLSKKLDPVASGWPTCLKAIAAVALLLKDADKLTLGQNVLVIAPHNLESIVRQPPDRWMTNARMTHYQSLLLNERVSFAPPAILNPATLLPVESDDTPIHICSEILAEETGTRPDLRDQPLPGVPAWYTDGSSFIMDGRRQAGAAIVDNKRTVWASNLPEGTSAQKAELIALTQALRLAEGKSINIYTDSRYAFATAHVHGAIYKQRGWLTSAGKDIKNKEEILALLEAIHLPKRVAIIHCPGHQRGTDPVATGNRKADEAAKQAAQSTRILTETTKNAGKRTADGSEFEKRTADGSEFESPKKKAKVE

SEQ ID NO: 7388 - protein, 2216 aa, synthetic construct
MPAAKRVKLDGGDKKYSIGLDIGTNSVGWAVITDEYKVPSKKFKVLGNTDRHSIKKNLIGALLFDSGETAEATRLKRTARRRYTRRKNRICYLQEIFSNEMAKVDDSFFHRLEESFLVEEDKKHERHPIFGNIVDEVAYHEKYPTIYHLRKKLVDSTDKADLRLIYLALAHMIKFRGHFLIEGDLNPDNSDVDKLFIQLVQTYNQLFEENPINASGVDAKAILSARLSKSRRLENLIAQLPGEKKNGLFGNLIALSLGLTPNFKSNFDLAEDAKLQLSKDTYDDDLDNLLAQIGDQYADLFLAAKNLSDAILLSDILRVNTEITKAPLSASMIKRYDEHHQDLTLLKALVRQQLPEKYKEIFFDQSKNGYAGYIDGGASQEEFYKFIKPILEKMDGTEELLVKLNREDLLRKQRTFDNGSIPHQIHLGELHAILRRQEDFYPFLKDNREKIEKILTFRIPYYVGPLARGNSRFAWMTRKSEETITPWNFEEVVDKGASAQSFIERMTNFDKNLPNEKVLPKHSLLYEYFTVYNELTKVKYVTEGMRKPAFLSGEQKKAIVDLLFKTNRKVTVKQLKEDYFKKIECFDSVEISGVEDRFNASLGTYHDLLKIIKDKDFLDNEENEDILEDIVLTLTLFEDREMIEERLKTYAHLFDDKVMKQLKRRRYTGWGRLSRKLINGIRDKQSGKTILDFLKSDGFANRNFMQLIHDDSLTFKEDIQKAQVSGQGDSLHEHIANLAGSPAIKKGILQTVKVVDELVKVMGRHKPENIVIEMARENQTTQKGQKNSRERMKRIEEGIKELGSQILKEHPVENTQLQNEKLYLYYLQNGRDMYVDQELDINRLSDYDVDHIVPQSFLKDDSIDNKVLTRSDKARGKSDNVPSEEVVKKMKNYWRQLLNAKLITQRKFDNLTKAERGGLSELDKAGFIKRQLVETRQITKHVAQILDSRMNTKYDENDKLIREVKVITLKSKLVSDFRKDFQFYKVREINNYHHAHDAYLNAVVGTALIKKYPKLESEFVYGDYKVYDVRKMIAKSEQEIGKATAKYFFYSNIMNFFKTEITLANGEIRKRPLIETNGETGEIVWDKGRDFATVRKVLSMPQVNIVKKTEVQTGGFSKESILPKRNSDKLIARKKDWDPKKYGGFDSPTVAYSVLVVAKVEKGKSKKLKSVKELLGITIMERSSFEKNPIDFLEAKGYKEVKKDLIIKLPKYSLFELENGRKRMLASAGELQKGNELALPSKYVNFLYLASHYEKLKGSPEDNEQKQLFVEQHKHYLDEIIEQISEFSKRVILADANLDKVLSAYNKHRDKPIREQAENIIHLFTLTNLGAPAAFKYFDTTIDRKRYTSTKEVLDATLIHQSITGLYETRIDLSQLGGDGGGSSGGGPAPGGTLGDQGSRGSDPLPEPRVTLTVEGIPTEFLVNTGAEHSVLTKPMGKMGSKRTVVAGATGSKVYPWTTKRLLKIGQKQVTHSFLVIPECPAPLLGRDLLTKLKAQIQFSTEGPQVTWEDRPAMCLVLNLEEEYRLHEKPVPPSIDPSWLQLFPMVWAEKAGMGLANQVPPVVVELKSDASPVAVRQYPMSKEAREGIRPHIQRFLDLGILVPCQSPWNTPLLPVKKPGTNDYRPVQDLREVNKRVQDIHPTVPNPYNLLSSLPPSHTWYSVLDLKDAFFCLKLHPNSQPLFAFEWRDPEKGNTGQLTWTRLPQGFKNSPTLFNEALHRDLASFRALNPQVVMLQYVDDLLVAAPTYRDCKEGTRRLLQELSKLGYRVSAKKAQLCREEVTYLGYLLKGGKRWLTPARKATVMKIPTPTTPRQVREFLGKAGFCRLFIPGFASLAAPLYPLTRPKVPFTWTEAHQEAFGRIKEALLSAPALALPDLTKPFALYVDEKEGVARGVLTQTLGPWRRPVAYLSKKLDPVASGWPTCLKAIAAVALLLKDADKLTLGQNVLVIAPHNLESIVRQPPDRWMTNARMTHYQSLLLNERVSFAPPAILNPATLLPVESDDTPIHICSEILAEETGTRPDLRDQPLPGVPAWYTDGSSFIMDGRRQAGAAIVDNKRTVWASNLPEGTSAQKAELIALTQALRLAEGKSINIYTDSRYAFATAHVHGAIYKQRGWLTSAGKDIKNKEEILALLEAIHLPKRVAIIHCPGHQRGTDPVATGNRKADEAAKQAAQSTRILTETTKNAGKRTADGSEFEKRTADGSEFESPKKKAKVE

SEQ ID NO: 7389 - protein, 2094 aa, synthetic construct
MPAAKRVKLDGGDKKYSIGLDIGTNSVGWAVITDEYKVPSKKFKVLGNTDRHSIKKNLIGALLFDSGETAEATRLKRTARRRYTRRKNRICYLQEIFSNEMAKVDDSFFHRLEESFLVEEDKKHERHPIFGNIVDEVAYHEKYPTIYHLRKKLVDSTDKADLRLIYLALAHMIKFRGHFLIEGDLNPDNSDVDKLFIQLVQTYNQLFEENPINASGVDAKAILSARLSKSRRLENLIAQLPGEKKNGLFGNLIALSLGLTPNFKSNFDLAEDAKLQLSKDTYDDDLDNLLAQIGDQYADLFLAAKNLSDAILLSDILRVNTEITKAPLSASMIKRYDEHHQDLTLLKALVRQQLPEKYKEIFFDQSKNGYAGYIDGGASQEEFYKFIKPILEKMDGTEELLVKLNREDLLRKQRTFDNGSIPHQIHLGELHAILRRQEDFYPFLKDNREKIEKILTFRIPYYVGPLARGNSRFAWMTRKSEETITPWNFEEVVDKGASAQSFIERMTNFDKNLPNEKVLPKHSLLYEYFTVYNELTKVKYVTEGMRKPAFLSGEQKKAIVDLLFKTNRKVTVKQLKEDYFKKIECFDSVEISGVEDRFNASLGTYHDLLKIIKDKDFLDNEENEDILEDIVLTLTLFEDREMIEERLKTYAHLFDDKVMKQLKRRRYTGWGRLSRKLINGIRDKQSGKTILDFLKSDGFANRNFMQLIHDDSLTFKEDIQKAQVSGQGDSLHEHIANLAGSPAIKKGILQTVKVVDELVKVMGRHKPENIVIEMARENQTTQKGQKNSRERMKRIEEGIKELGSQILKEHPVENTQLQNEKLYLYYLQNGRDMYVDQELDINRLSDYDVDHIVPQSFLKDDSIDNKVLTRSDKARGKSDNVPSEEVVKKMKNYWRQLLNAKLITQRKFDNLTKAERGGLSELDKAGFIKRQLVETRQITKHVAQILDSRMNTKYDENDKLIREVKVITLKSKLVSDFRKDFQFYKVREINNYHHAHDAYLNAVVGTALIKKYPKLESEFVYGDYKVYDVRKMIAKSEQEIGKATAKYFFYSNIMNFFKTEITLANGEIRKRPLIETNGETGEIVWDKGRDFATVRKVLSMPQVNIVKKTEVQTGGFSKESILPKRNSDKLIARKKDWDPKKYGGFDSPTVAYSVLVVAKVEKGKSKKLKSVKELLGITIMERSSFEKNPIDFLEAKGYKEVKKDLIIKLPKYSLFELENGRKRMLASAGELQKGNELALPSKYVNFLYLASHYEKLKGSPEDNEQKQLFVEQHKHYLDEIIEQISEFSKRVILADANLDKVLSAYNKHRDKPIREQAENIIHLFTLTNLGAPAAFKYFDTTIDRKRYTSTKEVLDATLIHQSITGLYETRIDLSQLGGDGGGSSGGGPAPGGTLNLEDEYRLYETSAEPEVSPGSTWLSDFPQAWAETGGMGLAVRQAPLIIPLKATSTPVSIKQYPMSQEAKLGIKPHIQRLLDQGILVPCQSPWNTPLLPVKKPGTNDYRPVQDLREVNKRVEDIHPTVPNPYNLLSGLPPSHRWYTVLDLKDAFFCLRLHPTSQPLFAFEWRDPGMGISGQLTWTRLPQGFKNSPTLFNEALHRDLADFRIQHPDLILLQYVDDILLAATSELDCQQGTRALLLTLGNLGYRASAKKAQLCQKQVKYLGYLLKEGQRWLTEARKETVMGQPTPKTPRQLREFLGKAGFCRLFIPGFAEMAAPLYPLTKPGTLFNWGPDQQKAYQEIKQALLTAPALGLPDLTKPFELFVDEKQGYAKGVLTQKLGPWRRPVAYLSKKLDPVAAGWPPCLRMVAAIAVLRKDAGKLTMGQPLVILAPHAVEALVKQPPDRWLSNARMTHYQAMLLDTDRVQFGPVVALNPATLLPLPEEGAPHDCLEILAETHGTRPDLTDQPIPDADHTWYTDGSSFLQEGQRKAGAAVTTETEVIWARALPAGTSAQRAELIALTQALKMAEGKRLNVYTDSRYAFATAHIHGEIYRRRGWLTSEGREIKNKSEILALLKALFLPKRLSIIHCLGHQKGDSAEARGNRLADQAAREAAIKTPPDTSTLLAGKRTADGSEFEKRTADGSEFESPKKKAKVE

SEQ ID NO: 7390 - protein, 2094 aa, synthetic construct
MPAAKRVKLDGGDKKYSIGLDIGTNSVGWAVITDEYKVPSKKFKVLGNTDRHSIKKNLIGALLFDSGETAEATRLKRTARRRYTRRKNRICYLQEIFSNEMAKVDDSFFHRLEESFLVEEDKKHERHPIFGNIVDEVAYHEKYPTIYHLRKKLVDSTDKADLRLIYLALAHMIKFRGHFLIEGDLNPDNSDVDKLFIQLVQTYNQLFEENPINASGVDAKAILSARLSKSRRLENLIAQLPGEKKNGLFGNLIALSLGLTPNFKSNFDLAEDAKLQLSKDTYDDDLDNLLAQIGDQYADLFLAAKNLSDAILLSDILRVNTEITKAPLSASMIKRYDEHHQDLTLLKALVRQQLPEKYKEIFFDQSKNGYAGYIDGGASQEEFYKFIKPILEKMDGTEELLVKLNREDLLRKQRTFDNGSIPHQIHLGELHAILRRQEDFYPFLKDNREKIEKILTFRIPYYVGPLARGNSRFAWMTRKSEETITPWNFEEVVDKGASAQSFIERMTNFDKNLPNEKVLPKHSLLYEYFTVYNELTKVKYVTEGMRKPAFLSGEQKKAIVDLLFKTNRKVTVKQLKEDYFKKIECFDSVEISGVEDRFNASLGTYHDLLKIIKDKDFLDNEENEDILEDIVLTLTLFEDREMIEERLKTYAHLFDDKVMKQLKRRRYTGWGRLSRKLINGIRDKQSGKTILDFLKSDGFANRNFMQLIHDDSLTFKEDIQKAQVSGQGDSLHEHIANLAGSPAIKKGILQTVKVVDELVKVMGRHKPENIVIEMARENQTTQKGQKNSRERMKRIEEGIKELGSQILKEHPVENTQLQNEKLYLYYLQNGRDMYVDQELDINRLSDYDVDHIVPQSFLKDDSIDNKVLTRSDKARGKSDNVPSEEVVKKMKNYWRQLLNAKLITQRKFDNLTKAERGGLSELDKAGFIKRQLVETRQITKHVAQILDSRMNTKYDENDKLIREVKVITLKSKLVSDFRKDFQFYKVREINNYHHAHDAYLNAVVGTALIKKYPKLESEFVYGDYKVYDVRKMIAKSEQEIGKATAKYFFYSNIMNFFKTEITLANGEIRKRPLIETNGETGEIVWDKGRDFATVRKVLSMPQVNIVKKTEVQTGGFSKESILPKRNSDKLIARKKDWDPKKYGGFDSPTVAYSVLVVAKVEKGKSKKLKSVKELLGITIMERSSFEKNPIDFLEAKGYKEVKKDLIIKLPKYSLFELENGRKRMLASAGELQKGNELALPSKYVNFLYLASHYEKLKGSPEDNEQKQLFVEQHKHYLDEIIEQISEFSKRVILADANLDKVLSAYNKHRDKPIREQAENIIHLFTLTNLGAPAAFKYFDTTIDRKRYTSTKEVLDATLIHQSITGLYETRIDLSQLGGDGGGSSGGGPAPGGLGIEDEYRLHETSTEPDVSLGSTWLSDFPQAWAETGGMGLAVRQAPLIIPLKATSTPVSIQQYPMSHEARLGIKPHIQRLLDQGILVPCQSPWNTPLLPVKKPGTNDYRPVQDLREVNKRVEDIHPTVPNPYNLLSGLPPSHQWYTVLDLKDAFFCLRLHPTSQPLFAFEWRDPGMGISGQLTWTRLPQGFKNSPTLFNEALHRDLADFRIQHPDLILLQYVDDILLAATSELDCQQGTRALLQTLGDLGYRASAKKAQICQKQVKYLGYLLREGQRWLTEARKETVMGQPVPKTPRQLREFLGKAGFCRLFIPGFAEMAAPLYPLTKPGTLFSWGPDQQKAYQEIKQALLTAPALGLPDLTKPFELFVDEKQGYAKGVLTQKLGPWRRPVAYLSKKLDPVAAGWPPCLRMVAAIAVLTKDAGKLTMGQPLVILAPHAVEALVKQPPDRWLSNARMTHYQAMLLDTDRVQFGPVVALNPATLLPLPEEGAPHDCLEILAETHGTRPDLTDQPIPDADHTWYTDGSSFLQEGQRKAGAAVTTETEVIWAGALPAGTSAQRAELIALTQALKMAEGKRLNVYTDSRYAFATAHIHGEIYRRRGWLTSEGREIKNKSEILALLKALFLPKRLSIIHCLGHQKGDSAEARGNRLADQAAREAAIKTPPDTSTLLIAGKRTADGSEFEKRTADGSEFESPKKKAKVE

SEQ ID NO: 7391 - protein, 2094 aa, synthetic construct; identical to SEQ ID NO: 7390

SEQ ID NO: 7392 - protein, 2094 aa, synthetic construct
MPAAKRVKLDGGDKKYSIGLDIGTNSVGWAVITDEYKVPSKKFKVLGNTDRHSIKKNLIGALLFDSGETAEATRLKRTARRRYTRRKNRICYLQEIFSNEMAKVDDSFFHRLEESFLVEEDKKHERHPIFGNIVDEVAYHEKYPTIYHLRKKLVDSTDKADLRLIYLALAHMIKFRGHFLIEGDLNPDNSDVDKLFIQLVQTYNQLFEENPINASGVDAKAILSARLSKSRRLENLIAQLPGEKKNGLFGNLIALSLGLTPNFKSNFDLAEDAKLQLSKDTYDDDLDNLLAQIGDQYADLFLAAKNLSDAILLSDILRVNTEITKAPLSASMIKRYDEHHQDLTLLKALVRQQLPEKYKEIFFDQSKNGYAGYIDGGASQEEFYKFIKPILEKMDGTEELLVKLNREDLLRKQRTFDNGSIPHQIHLGELHAILRRQEDFYPFLKDNREKIEKILTFRIPYYVGPLARGNSRFAWMTRKSEETITPWNFEEVVDKGASAQSFIERMTNFDKNLPNEKVLPKHSLLYEYFTVYNELTKVKYVTEGMRKPAFLSGEQKKAIVDLLFKTNRKVTVKQLKEDYFKKIECFDSVEISGVEDRFNASLGTYHDLLKIIKDKDFLDNEENEDILEDIVLTLTLFEDREMIEERLKTYAHLFDDKVMKQLKRRRYTGWGRLSRKLINGIRDKQSGKTILDFLKSDGFANRNFMQLIHDDSLTFKEDIQKAQVSGQGDSLHEHIANLAGSPAIKKGILQTVKVVDELVKVMGRHKPENIVIEMARENQTTQKGQKNSRERMKRIEEGIKELGSQILKEHPVENTQLQNEKLYLYYLQNGRDMYVDQELDINRLSDYDVDHIVPQSFLKDDSIDNKVLTRSDKARGKSDNVPSEEVVKKMKNYWRQLLNAKLITQRKFDNLTKAERGGLSELDKAGFIKRQLVETRQITKHVAQILDSRMNTKYDENDKLIREVKVITLKSKLVSDFRKDFQFYKVREINNYHHAHDAYLNAVVGTALIKKYPKLESEFVYGDYKVYDVRKMIAKSEQEIGKATAKYFFYSNIMNFFKTEITLANGEIRKRPLIETNGETGEIVWDKGRDFATVRKVLSMPQVNIVKKTEVQTGGFSKESILPKRNSDKLIARKKDWDPKKYGGFDSPTVAYSVLVVAKVEKGKSKKLKSVKELLGITIMERSSFEKNPIDFLEAKGYKEVKKDLIIKLPKYSLFELENGRKRMLASAGELQKGNELALPSKYVNFLYLASHYEKLKGSPEDNEQKQLFVEQHKHYLDEIIEQISEFSKRVILADANLDKVLSAYNKHRDKPIREQAENIIHLFTLTNLGAPAAFKYFDTTIDRKRYTSTKEVLDATLIHQSITGLYETRIDLSQLGGDGGGSSGGGPAPGGTLNIEDEYRLHETSKGPDVPLGSTWLSDFPQAWAETGGMGLAFRQAPLIISLKATSTPVSIKQYPMSQEARLGIKPHIQRLLDQGILVPCQSPWNTPLLPVKKPGTNDYRPVQDLREVNKRVEDIHPTVPNPYNLLSGLPPSHQWYTVLDLKDAFFCLRLHPTSQSLFAFEWKDPEMGISGQLTWTRLPQGFKNSPTLFNEALHRDLADFRIQHPDLILLQYVDDLLLAATSELDCQQGTRALLQTLGDLGYRASAKKAQICQKQVKYLGYLLKEGQRWLTEARKETVMGQPTPKTPRQLREFLGKAGLCRLFIPGFAEMAAPLYPLTKPGTLFKWGPDQQKAYQEIKQALLTAPALGLPDLTKPFELFVDEKQGYAKGVLTQKLGPWRRPVAYLSKKLDPVAAGWPPCLRMVAAIAVLTKDVGKLTMGQPLVILAPHAVEALVKQPPDRWLSNARMTHYQALLLDTDRVQFGPIVALNPATLLPLPEEGLQHDCLDILAEAHGTRPDLTDQPLPDADHTWYTDGSSFLQEGQRRAGAAVTTETEVIWAKALPAGTSAQRAELIALTQALKMAAGKKLNVYTDSRYAFATAHIHGEIYRRRGWLTSEGKEIKNKDEILALLKALFLPKRLSIIHCPGHQKGNHAEARGNRMADQAAREVATRETPETSTLLAGKRTADGSEFEKRTADGSEFESPKKKAKVE

SEQ ID NO: 7393 - protein, 2094 aa, synthetic construct
MPAAKRVKLDGGDKKYSIGLDIGTNSVGWAVITDEYKVPSKKFKVLGNTDRHSIKKNLIGALLFDSGETAEATRLKRTARRRYTRRKNRICYLQEIFSNEMAKVDDSFFHRLEESFLVEEDKKHERHPIFGNIVDEVAYHEKYPTIYHLRKKLVDSTDKADLRLIYLALAHMIKFRGHFLIEGDLNPDNSDVDKLFIQLVQTYNQLFEENPINASGVDAKAILSARLSKSRRLENLIAQLPGEKKNGLFGNLIALSLGLTPNFKSNFDLAEDAKLQLSKDTYDDDLDNLLAQIGDQYADLFLAAKNLSDAILLSDILRVNTEITKAPLSASMIKRYDEHHQDLTLLKALVRQQLPEKYKEIFFDQSKNGYAGYIDGGASQEEFYKFIKPILEKMDGTEELLVKLNREDLLRKQRTFDNGSIPHQIHLGELHAILRRQEDFYPFLKDNREKIEKILTFRIPYYVGPLARGNSRFAWMTRKSEETITPWNFEEVVDKGASAQSFIERMTNFDKNLPNEKVLPKHSLLYEYFTVYNELTKVKYVTEGMRKPAFLSGEQKKAIVDLLFKTNRKVTVKQLKEDYFKKIECFDSVEISGVEDRFNASLGTYHDLLKIIKDKDFLDNEENEDILEDIVLTLTLFEDREMIEERLKTYAHLFDDKVMKQLKRRRYTGWGRLSRKLINGIRDKQSGKTILDFLKSDGFANRNFMQLIHDDSLTFKEDIQKAQVSGQGDSLHEHIANLAGSPAIKKGILQTVKVVDELVKVMGRHKPENIVIEMARENQTTQKGQKNSRERMKRIEEGIKELGSQILKEHPVENTQLQNEKLYLYYLQNGRDMYVDQELDINRLSDYDVDHIVPQSFLKDDSIDNKVLTRSDKARGKSDNVPSEEVVKKMKNYWRQLLNAKLITQRKFDNLTKAERGGLSELDKAGFIKRQLVETRQITKHVAQILDSRMNTKYDENDKLIREVKVITLKSKLVSDFRKDFQFYKVREINNYHHAHDAYLNAVVGTALIKKYPKLESEFVYGDYKVYDVRKMIAKSEQEIGKATAKYFFYSNIMNFFKTEITLANGEIRKRPLIETNGETGEIVWDKGRDFATVRKVLSMPQVNIVKKTEVQTGGFSKESILPKRNSDKLIARKKDWDPKKYGGFDSPTVAYSVLVVAKVEKGKSKKLKSVKELLGITIMERSSFEKNPIDFLEAKGYKEVKKDLIIKLPKYSLFELENGRKRMLASAGELQKGNELALPSKYVNFLYLASHYEKLKGSPEDNEQKQLFVEQHKHYLDEIIEQISEFSKRVILADANLDKVLSAYNKHRDKPIREQAENIIHLFTLTNLGAPAAFKYFDTTIDRKRYTSTKEVLDATLIHQSITGLYETRIDLSQLGGDGGGSSGGGPAPGGTLNIEDEHRLHETSKEPDVSLGSTWLSDFPQAWAETGGMGLAVRQAPLIIPLKATSTPVSIKQYPMSQEARLGIKPHIQRLLDQGILVPCQSPWNTPLLPVKKPGTNDYRPVQDLREVNKRVEDIHPTVPNPYNLLSGLPPSHQWYTVLDLKDAFFCLRLHPTSQPLFAFEWRDPEMGISGQLTWTRLPQGFKNSPTLFNEALHRDLADFRIQHPDLILLQYVDDLLLAATSELDCQQGTRALLQTLGNLGYRASAKKAQICQKQVKYLGYLLKEGQRWLTEARKETVMGQPTPKTPRQLREFLGTAGFCRLWIPGFAEMAAPLYPLTKPGTLFNWGPDQQKAYQEIKQALLTAPALGLPDLTKPFELFVDEKQGYAKGVLTQKLGPWRRPVAYLSKKLDPVAAGWPPCLRMVAAIAVLTKDAGKLTMGQPLVILAPHAVEALVKQPPDRWLSNARMTHYQALLLDTDRVQFGPVVALNPATLLPLPEEGLQHNCLDILAEAHGTRPDLTDQPLPDADHTWYTDGSSLLQEGQRKAGAAVTTETEVIWAKALPAGTSAQRAELIALTQALKMAEGKKLNVYTDSRYAFATAHIHGEIYRRRGWLTSEGKEIKNKDEILALLKALFLPKRLSIIHCPGHQKGHSAEARGNRMADQAARKAAITETPDTSTLLAGKRTADGSEFEKRTADGSEFESPKKKAKVE

SEQ ID NO: 7394 - protein, 2094 aa, synthetic construct; identical to SEQ ID NO: 7393

SEQ ID NO: 7395 - protein, 2088 aa, synthetic construct; identical to SEQ ID NO: 4532

SEQ ID NO: 7396 - protein, 2088 aa, synthetic construct
MPAAKRVKLDGGDKKYSIGLDIGTNSVGWAVITDEYKVPSKKFKVLGNTDRHSIKKNLIGALLFDSGETAEATRLKRTARRRYTRRKNRICYLQEIFSNEMAKVDDSFFHRLEESFLVEEDKKHERHPIFGNIVDEVAYHEKYPTIYHLRKKLVDSTDKADLRLIYLALAHMIKFRGHFLIEGDLNPDNSDVDKLFIQLVQTYNQLFEENPINASGVDAKAILSARLSKSRRLENLIAQLPGEKKNGLFGNLIALSLGLTPNFKSNFDLAEDAKLQLSKDTYDDDLDNLLAQIGDQYADLFLAAKNLSDAILLSDILRVNTEITKAPLSASMIKRYDEHHQDLTLLKALVRQQLPEKYKEIFFDQSKNGYAGYIDGGASQEEFYKFIKPILEKMDGTEELLVKLNREDLLRKQRTFDNGSIPHQIHLGELHAILRRQEDFYPFLKDNREKIEKILTFRIPYYVGPLARGNSRFAWMTRKSEETITPWNFEEVVDKGASAQSFIERMTNFDKNLPNEKVLPKHSLLYEYFTVYNELTKVKYVTEGMRKPAFLSGEQKKAIVDLLFKTNRKVTVKQLKEDYFKKIECFDSVEISGVEDRFNASLGTYHDLLKIIKDKDFLDNEENEDILEDIVLTLTLFEDREMIEERLKTYAHLFDDKVMKQLKRRRYTGWGRLSRKLINGIRDKQSGKTILDFLKSDGFANRNFMQLIHDDSLTFKEDIQKAQVSGQGDSLHEHIANLAGSPAIKKGILQTVKVVDELVKVMGRHKPENIVIEMARENQTTQKGQKNSRERMKRIEEGIKELGSQILKEHPVENTQLQNEKLYLYYLQNGRDMYVDQELDINRLSDYDVDHIVPQSFLKDDSIDNKVLTRSDKARGKSDNVPSEEVVKKMKNYWRQLLNAKLITQRKFDNLTKAERGGLSELDKAGFIKRQLVETRQITKHVAQILDSRMNTKYDENDKLIREVKVITLKSKLVSDFRKDFQFYKVREINNYHHAHDAYLNAVVGTALIKKYPKLESEFVYGDYKVYDVRKMIAKSEQEIGKATAKYFFYSNIMNFFKTEITLANGEIRKRPLIETNGETGEIVWDKGRDFATVRKVLSMPQVNIVKKTEVQTGGFSKESILPKRNSDKLIARKKDWDPKKYGGFDSPTVAYSVLVVAKVEKGKSKKLKSVKELLGITIMERSSFEKNPIDFLEAKGYKEVKKDLIIKLPKYSLFELENGRKRMLASAGELQKGNELALPSKYVNFLYLASHYEKLKGSPEDNEQKQLFVEQHKHYLDEIIEQISEFSKRVILADANLDKVLSAYNKHRDKPIREQAENIIHLFTLTNLGAPAAFKYFDTTIDRKRYTSTKEVLDATLIHQSITGLYETRIDLSQLGGDGGGSSGGGPAPGGTLQLDDEYRLYSPLVKPDQNIQFWLEQFPQAWAETAGMGLAKQVPPQVIQLKASATPVSVRQYPLSKEAQEGIRPHVQRLIQQGILVPVQSPWNTPLLPVRKPGTNDYRPVQDLREVNKRVQDIHPTVPNPYNLLCALPPQRSWYTVLDLKDAFFCLRLHPTSQPLFAFEWRDPGTGRTGQLTWTRLPQGFKNSPTIFDEALHRDLANFRIQHPQVTLLQYVDDLLLAGATKQDCLEGTKALLLELSDLGYRASAKKAQICRREVTYLGYSLRDGQRWLTEARKKTVVQIPAPTTAKQVREFLGTAGFCRLWIPGFATLAAPLYPLTKEKGEFSWAPEHQKAFDAIKKALLSAPALALPDVTKPFTLYVDERKGVARGVLTQTLGPWRRPVAYLSKKLDPVASGWPVCLKAIAAVAILVKDADKLTLGQNITVIAPHALENIVRQPPDRWMTNARMTHYQSLLLTERVTFAPPAALNPATLLPEETDEPVTHDCHQLLIEETGVRKDLTDIPLTGEVLTWFTDGSSYVVEGKRMAGAAVVDGTRTIWASSLPEGTSAQKAELMALTQALRLAEGKSINIYTDSRYAFATAHVHGAIYKQRGLLTSAGREIKNKEEILSLLEALHLPKRLAIIHCPGHQKAKDPISRGNQMADRVAKQAAQGVNLLAGKRTADGSEFEKRTADGSEFESPKKKAKVE

SEQ ID NO: 7397 - protein, 2088 aa, synthetic construct; identical to SEQ ID NO: 4532

SEQ ID NO: 7398 - protein, 2085 aa, synthetic construct
MPAAKRVKLDGGDKKYSIGLDIGTNSVGWAVITDEYKVPSKKFKVLGNTDRHSIKKNLIGALLFDSGETAEATRLKRTARRRYTRRKNRICYLQEIFSNEMAKVDDSFFHRLEESFLVEEDKKHERHPIFGNIVDEVAYHEKYPTIYHLRKKLVDSTDKADLRLIYLALAHMIKFRGHFLIEGDLNPDNSDVDKLFIQLVQTYNQLFEENPINASGVDAKAILSARLSKSRRLENLIAQLPGEKKNGLFGNLIALSLGLTPNFKSNFDLAEDAKLQLSKDTYDDDLDNLLAQIGDQYADLFLAAKNLSDAILLSDILRVNTEITKAPLSASMIKRYDEHHQDLTLLKALVRQQLPEKYKEIFFDQSKNGYAGYIDGGASQEEFYKFIKPILEKMDGTEELLVKLNREDLLRKQRTFDNGSIPHQIHLGELHAILRRQEDFYPFLKDNREKIEKILTFRIPYYVGPLARGNSRFAWMTRKSEETITPWNFEEVVDKGASAQSFIERMTNFDKNLPNEKVLPKHSLLYEYFTVYNELTKVKYVTEGMRKPAFLSGEQKKAIVDLLFKTNRKVTVKQLKEDYFKKIECFDSVEISGVEDRFNASLGTYHDLLKIIKDKDFLDNEENEDILEDIVLTLTLFEDREMIEERLKTYAHLFDDKVMKQLKRRRYTGWGRLSRKLINGIRDKQSGKTILDFLKSDGFANRNFMQLIHDDSLTFKEDIQKAQVSGQGDSLHEHIANLAGSPAIKKGILQTVKVVDELVKVMGRHKPENIVIEMARENQTTQKGQKNSRERMKRIEEGIKELGSQILKEHPVENTQLQNEKLYLYYLQNGRDMYVDQELDINRLSDYDVDHIVPQSFLKDDSIDNKVLTRSDKARGKSDNVPSEEVVKKMKNYWRQLLNAKLITQRKFDNLTKAERGGLSELDKAGFIKRQLVETRQITKHVAQILDSRMNTKYDENDKLIREVKVITLKSKLVSDFRKDFQFYKVREINNYHHAHDAYLNAVVGTALIKKYPKLESEFVYGDYKVYDVRKMIAKSEQEIGKATAKYFFYSNIMNFFKTEITLANGEIRKRPLIETNGETGEIVWDKGRDFATVRKVLSMPQVNIVKKTEVQTGGFSKESILPKRNSDKLIARKKDWDPKKYGGFDSPTVAYSVLVVAKVEKGKSKKLKSVKELLGITIMERSSFEKNPIDFLEAKGYKEVKKDLIIKLPKYSLFELENGRKRMLASAGELQKGNELALPSKYVNFLYLASHYEKLKGSPEDNEQKQLFVEQHKHYLDEIIEQISEFSKRVILADANLDKVLSAYNKHRDKPIREQAENIIHLFTLTNLGAPAAFKYFDTTIDRKRYTSTKEVLDATLIHQSITGLYETRIDLSQLGGDGGGSSGGGPAPGGIPWLMKKPLQLTTLVPLQEYEERLLKQTMLTGSYKEKLQSLFLKYDALWQHWENQVGHRRIKPHHIATGTVNPRPQKQYPINPKAKASIQTVINDLLKQGVLIQQNSIMNTPVYPVPKPDGKWRMVLDYREVNKTIPLIAAQNQHSAGILSSIFRGKYKTTLDLSNGFWAHSITPESYWLTAFTWLGQQYCWTRLPQGFLNSPALFNADVVDLLKEVPNVQVYVDDIYISHDDPREHLEQLEKVFSLLLNAGYVVSLKKSEIAQHEVEFLGFNITKEGRGLTETFKQKLLNITPPRDLKQLQSILGKLNFARNFIPNFSELVKPLYNIIATAPGKYITWTTDNSQQLQNIISMLNSAENLEERNPEVRLIMKVNTSPSAGYIRFYNEFAKRPIMYLNYVYTKAEVKFTNTEKLLTTIHKGLIKALDLGMGQEILVYSPIVSMTKIQKTPLPERKALPIRWITWMSYLEDPRIQFHYDKTLPELQQVPTVTDDIIAKIKHPSEFSMVFYTDGSAIKHPNVNKSHNAGMGIAQVQFKPEFTVINTWSIPLGDHTAQLAEVAAVEFACKKALKIDGPVLIVTDSFYVAESVNKELPYWQSNGFFNNKKKPLKHVSKWKSIADCIQLKPDIIIIHEKGHQPTASTFHTEGNNLADKLATQGSYVVNAGKRTADGSEFEKRTADGSEFESPKKKAKVE

SEQ ID NO: 7399 - protein, 2174 aa, synthetic construct
MPAAKRVKLDGGDKKYSIGLDIGTNSVGWAVITDEYKVPSKKFKVLGNTDRHSIKKNLIGALLFDSGETAEATRLKRTARRRYTRRKNRICYLQEIFSNEMAKVDDSFFHRLEESFLVEEDKKHERHPIFGNIVDEVAYHEKYPTIYHLRKKLVDSTDKADLRLIYLALAHMIKFRGHFLIEGDLNPDNSDVDKLFIQLVQTYNQLFEENPINASGVDAKAILSARLSKSRRLENLIAQLPGEKKNGLFGNLIALSLGLTPNFKSNFDLAEDAKLQLSKDTYDDDLDNLLAQIGDQYADLFLAAKNLSDAILLSDILRVNTEITKAPLSASMIKRYDEHHQDLTLLKALVRQQLPEKYKEIFFDQSKNGYAGYIDGGASQEEFYKFIKPILEKMDGTEELLVKLNREDLLRKQRTFDNGSIPHQIHLGELHAILRRQEDFYPFLKDNREKIEKILTFRIPYYVGPLARGNSRFAWMTRKSEETITPWNFEEVVDKGASAQSFIERMTNFDKNLPNEKVLPKHSLLYEYFTVYNELTKVKYVTEGMRKPAFLSGEQKKAIVDLLFKTNRKVTVKQLKEDYFKKIECFDSVEISGVEDRFNASLGTYHDLLKIIKDKDFLDNEENEDILEDIVLTLTLFEDREMIEERLKTYAHLFDDKVMKQLKRRRYTGWGRLSRKLINGIRDKQSGKTILDFLKSDGFANRNFMQLIHDDSLTFKEDIQKAQVSGQGDSLHEHIANLAGSPAIKKGILQTVKVVDELVKVMGRHKPENIVIEMARENQTTQKGQKNSRERMKRIEEGIKELGSQILKEHPVENTQLQNEKLYLYYLQNGRDMYVDQELDINRLSDYDVDHIVPQSFLKDDSIDNKVLTRSDKARGKSDNVPSEEVVKKMKNYWRQLLNAKLITQRKFDNLTKAERGGLSELDKAGFIKRQLVETRQITKHVAQILDSRMNTKYDENDKLIREVKVITLKSKLVSDFRKDFQFYKVREINNYHHAHDAYLNAVVGTALIKKYPKLESEFVYGDYKVYDVRKMIAKSEQEIGKATAKYFFYSNIMNFFKTEITLANGEIRKRPLIETNGETGEIVWDKGRDFATVRKVLSMPQVNIVKKTEVQTGGFSKESILPKRNSDKLIARKKDWDPKKYGGFDSPTVAYSVLVVAKVEKGKSKKLKSVKELLGITIMERSSFEKNPIDFLEAKGYKEVKKDLIIKLPKYSLFELENGRKRMLASAGELQKGNELALPSKYVNFLYLASHYEKLKGSPEDNEQKQLFVEQHKHYLDEIIEQISEFSKRVILADANLDKVLSAYNKHRDKPIREQAENIIHLFTLTNLGAPAAFKYFDTTIDRKRYTSTKEVLDATLIHQSITGLYETRIDLSQLGGDGGGSSGGGPAPGGMDPLQLLQPLEAEIKGTKLKAHWNSGATITCVPQAFLEEEVPIKNIWIKTIHGEKEQPVYYLTFKIQGRKVEAEVISSPYDYILVSPSDIPWLMKKPLQLTTLVPLQEYEERLLKQTMLTGSYKEKLQSLFLKYDALWQHWENQVGHRRIKPHHIATGTVNPRPQKQYPINPKAKASIQTVINDLLKQGVLIQQNSIMNTPVYPVPKPDGKWRMVLDYREVNKTIPLIAAQNQHSAGILSSIFRGKYKTTLDLSNGFWAHSITPESYWLTAFTWLGQQYCWTRLPQGFLNSPALFNADVVDLLKEVPNVQVYVDDIYISHDDPREHLEQLEKVFSLLLNAGYVVSLKKSEIAQHEVEFLGFNITKEGRGLTETFKQKLLNITPPRDLKQLQSILGLLNFARNFIPNFSELVKPLYNIIATAPGKYITWTTDNSQQLQNIISMLNSAENLEERNPEVRLIMKVNTSPSAGYIRFYNEFAKRPIMYLNYVYTKAEVKFTNTEKLLTTIHKGLIKALDLGMGQEILVYSPIVSMTKIQKTPLPERKALPIRWITWMSYLEDPRIQFHYDKTLPELQQVPTVTDDIIAKIKHPSEFSMVFYTDGSAIKHPNVNKSHNAGMGIAQVQFKPEFTVINTWSIPLGDHTAQLAEVAAVEFACKKALKIDGPVLIVTDSFYVAESVNKELPYWQSNGFFNNKKKPLKHVSKWKSIADCIQLKPDIIIIHEKGHQPTASTFHTEGNNLADKLATQGSYVVNAGKRTADGSEFEKRTADGSEFESPKKKAKVE

SEQ ID NO: 7400 - protein, 2092 aa, synthetic construct
MPAAKRVKLDGGDKKYSIGLDIGTNSVGWAVITDEYKVPSKKFKVLGNTDRHSIKKNLIGALLFDSGETAEATRLKRTARRRYTRRKNRICYLQEIFSNEMAKVDDSFFHRLEESFLVEEDKKHERHPIFGNIVDEVAYHEKYPTIYHLRKKLVDSTDKADLRLIYLALAHMIKFRGHFLIEGDLNPDNSDVDKLFIQLVQTYNQLFEENPINASGVDAKAILSARLSKSRRLENLIAQLPGEKKNGLFGNLIALSLGLTPNFKSNFDLAEDAKLQLSKDTYDDDLDNLLAQIGDQYADLFLAAKNLSDAILLSDILRVNTEITKAPLSASMIKRYDEHHQDLTLLKALVRQQLPEKYKEIFFDQSKNGYAGYIDGGASQEEFYKFIKPILEKMDGTEELLVKLNREDLLRKQRTFDNGSIPHQIHLGELHAILRRQEDFYPFLKDNREKIEKILTFRIPYYVGPLARGNSRFAWMTRKSEETITPWNFEEVVDKGASAQSFIERMTNFDKNLPNEKVLPKHSLLYEYFTVYNELTKVKYVTEGMRKPAFLSGEQKKAIVDLLFKTNRKVTVKQLKEDYFKKIECFDSVEISGVEDRFNASLGTYHDLLKIIKDKDFLDNEENEDILEDIVLTLTLFEDREMIEERLKTYAHLFDDKVMKQLKRRRYTGWGRLSRKLINGIRDKQSGKTILDFLKSDGFANRNFMQLIHDDSLTFKEDIQKAQVSGQGDSLHEHIANLAGSPAIKKGILQTVKVVDELVKVMGRHKPENIVIEMARENQTTQKGQKNSRERMKRIEEGIKELGSQILKEHPVENTQLQNEKLYLYYLQNGRDMYVDQELDINRLSDYDVDHIVPQSFLKDDSIDNKVLTRSDKARGKSDNVPSEEVVKKMKNYWRQLLNAKLITQRKFDNLTKAERGGLSELDKAGFIKRQLVETRQITKHVAQILDSRMNTKYDENDKLIREVKVITLKSKLVSDFRKDFQFYKVREINNYHHAHDAYLNAVVGTALIKKYPKLESEFVYGDYKVYDVRKMIAKSEQEIGKATAKYFFYSNIMNFFKTEITLANGEIRKRPLIETNGETGEIVWDKGRDFATVRKVLSMPQVNIVKKTEVQTGGFSKESILPKRNSDKLIARKKDWDPKKYGGFDSPTVAYSVLVVAKVEKGKSKKLKSVKELLGITIMERSSFEKNPIDFLEAKGYKEVKKDLIIKLPKYSLFELENGRKRMLASAGELQKGNELALPSKYVNFLYLASHYEKLKGSPEDNEQKQLFVEQHKHYLDEIIEQISEFSKRVILADANLDKVLSAYNKHRDKPIREQAENIIHLFTLTNLGAPAAFKYFDTTIDRKRYTSTKEVLDATLIHQSITGLYETRIDLSQLGGDGGGSSGGGPAPGGVLNLEEEYRLHEKPVPSSIDPSWLQLFPTVWAERAGMGLANQVPPVVVELRSGASPVAVRQYPMSKEAREGIRPHIQRFLDLGVLVPCQSPWNTPLLPVKKPGTNDYRPVQDLREINKRVQDIHPTVPNPYNLLSSLPPSHTWYSVLDLKDAFFCLKLHPNSQPLFAFEWRDPEKGNTGQLTWTRLPQGFKNSPTLFNEALHRDLAPFRALNPQVVLLQYVDDLLVAAPTYRDCKEGTQKLLQELSKLGYRVSAKKAQLCQKEVTYLGYLLKEGKRWLTPARKATVMKIPPPTTPRQVREFLGKAGFCRLFIPGFASLAAPLYPLTKPSIPFIWTEEHQKAFDRIKEALLSAPALALPDLTKPFTLYVDERAGVARGVLTQTLGPWRRPVAYLSKKLDPVASGWPTCLKAVAAVALLLKDADKLTLGQNVTVIASHSLESIVRQPPDRWMTNARMTHYQSLLLNERVSFAPPAVLNPATLLPVESEATPVHRCSEILAEETGTRRDLKDQPLPGVPAWYTDGSSFIAEGKRRAGAAIVDGKRTVWASSLPEGTSAQKAELVALTQALRLAEGKDINIYTDSRYAFATAHIHGAIYKQRGWLTSAGKDIKNKEEILALLEAIHLPKRVAIIHCPGHQKGNDPVATGNRRADEAAKQAALSTRVLAETTKPAGKRTADGSEFEKRTADGSEFESPKKKAKVE

SEQ ID NO: 7401 - protein, 2094 aa, synthetic construct
MPAAKRVKLDGGDKKYSIGLDIGTNSVGWAVITDEYKVPSKKFKVLGNTDRHSIKKNLIGALLFDSGETAEATRLKRTARRRYTRRKNRICYLQEIFSNEMAKVDDSFFHRLEESFLVEEDKKHERHPIFGNIVDEVAYHEKYPTIYHLRKKLVDSTDKADLRLIYLALAHMIKFRGHFLIEGDLNPDNSDVDKLFIQLVQTYNQLFEENPINASGVDAKAILSARLSKSRRLENLIAQLPGEKKNGLFGNLIALSLGLTPNFKSNFDLAEDAKLQLSKDTYDDDLDNLLAQIGDQYADLFLAAKNLSDAILLSDILRVNTEITKAPLSASMIKRYDEHHQDLTLLKALVRQQLPEKYKEIFFDQSKNGYAGYIDGGASQEEFYKFIKPILEKMDGTEELLVKLNREDLLRKQRTFDNGSIPHQIHLGELHAILRRQEDFYPFLKDNREKIEKILTFRIPYYVGPLARGNSRFAWMTRKSEETITPWNFEEVVDKGASAQSFIERMTNFDKNLPNEKVLPKHSLLYEYFTVYNELTKVKYVTEGMRKPAFLSGEQKKAIVDLLFKTNRKVTVKQLKEDYFKKIECFDSVEISGVEDRFNASLGTYHDLLKIIKDKDFLDNEENEDILEDIVLTLTLFEDREMIEERLKTYAHLFDDKVMKQLKRRRYTGWGRLSRKLINGIRDKQSGKTILDFLKSDGFANRNFMQLIHDDSLTFKEDIQKAQVSGQGDSLHEHIANLAGSPAIKKGILQTVKVVDELVKVMGRHKPENIVIEMARENQTTQKGQKNSRERMKRIEEGIKELGSQILKEHPVENTQLQNEKLYLYYLQNGRDMYVDQELDINRLSDYDVDHIVPQSFLKDDSIDNKVLTRSDKARGKSDNVPSEEVVKKMKNYWRQLLNAKLITQRKFDNLTKAERGGLSELDKAGFIKRQLVETRQITKHVAQILDSRMNTKYDENDKLIREVKVITLKSKLVSDFRKDFQFYKVREINNYHHAHDAYLNAVVGTALIKKYPKLESEFVYGDYKVYDVRKMIAKSEQEIGKATAKYFFYSNIMNFFKTEITLANGEIRKRPLIETNGETGEIVWDKGRDFATVRKVLSMPQVNIVKKTEVQTGGFSKESILPKRNSDKLIARKKDWDPKKYGGFDSPTVAYSVLVVAKVEKGKSKKLKSVKELLGITIMERSSFEKNPIDFLEAKGYKEVKKDLIIKLPKYSLFELENGRKRMLASAGELQKGNELALPSKYVNFLYLASHYEKLKGSPEDNEQKQLFVEQHKHYLDEIIEQISEFSKRVILADANLDKVLSAYNKHRDKPIREQAENIIHLFTLTNLGAPAAFKYFDTTIDRKRYTSTKEVLDATLIHQSITGLYETRIDLSQLGGDGGGSSGGGPAPGGTLNIEDEYRLHETSKEPDVPLGSTWLSDFPQAWAETGGMGLAVRQAPLIIPLKATSTPVSIKQYPMSQEARLGIKPHIQRLLDQGILVPCQSPWNTPLLPVKKPGTNDYRPVQDLREVNKRVEDIHPTVPNPYNLLSGLPPSHQWYTVLDLKDAFFCLRLHPTSQPLFAFEWRDPEMGISGQLTWTRLPQGFKNSPTLFNEALHRDLADFRIQHPDLILLQYVDDLLLAATSEQDCQRGTRALLQTLGNLGYRASAKKAQICQKQVKYLGYLLKEGQRWLTEARKETVMGQPTPKTPRQLREFLGTAGFCRLWIPGFAEMAAPLYPLTKPGTLFNWGPDQQKAYQEIKQALLTAPALGLPDLTKPFELFVDEKQGYAKGVLTQKLGPWRRPVAYLSKKLDPVAAGWPPCLRMVAAIAVLTKDAGKLTMGQPLVILAPHAVEALVKQPPDRWLSNARMTHYQAMLLDTDRVQFGPVVALNPATLLPLPEKEAPHDCLEILAETHGTRPDLTDQPIPDADYTWYTDGSSFLQEGQRRAGAAVTTETEVIWARALPAGTSAQRAELIALTQALKMAEGKKLNVYTDSRYAFATAHVHGEIYRRRGWLTSEGREIKNKNEILALLKALFLPKRLSIIHCPGHQKGNSAEARGNRMADQAAREAAMKAVLETSTLLAGKRTADGSEFEKRTADGSEFESPKKKAKVE

SEQ ID NO: 7402 - protein, 2096 aa, synthetic construct
MPAAKRVKLDGGDKKYSIGLDIGTNSVGWAVITDEYKVPSKKFKVLGNTDRHSIKKNLIGALLFDSGETAEATRLKRTARRRYTRRKNRICYLQEIFSNEMAKVDDSFFHRLEESFLVEEDKKHERHPIFGNIVDEVAYHEKYPTIYHLRKKLVDSTDKADLRLIYLALAHMIKFRGHFLIEGDLNPDNSDVDKLFIQLVQTYNQLFEENPINASGVDAKAILSARLSKSRRLENLIAQLPGEKKNGLFGNLIALSLGLTPNFKSNFDLAEDAKLQLSKDTYDDDLDNLLAQIGDQYADLFLAAKNLSDAILLSDILRVNTEITKAPLSASMIKRYDEHHQDLTLLKALVRQQLPEKYKEIFFDQSKNGYAGYIDGGASQEEFYKFIKPILEKMDGTEELLVKLNREDLLRKQRTFDNGSIPHQIHLGELHAILRRQEDFYPFLKDNREKIEKILTFRIPYYVGPLARGNSRFAWMTRKSEETITPWNFEEVVDKGASAQSFIERMTNFDKNLPNEKVLPKHSLLYEYFTVYNELTKVKYVTEGMRKPAFLSGEQKKAIVDLLFKTNRKVTVKQLKEDYFKKIECFDSVEISGVEDRFNASLGTYHDLLKIIKDKDFLDNEENEDILEDIVLTLTLFEDREMIEERLKTYAHLFDDKVMKQLKRRRYTGWGRLSRKLINGIRDKQSGKTILDFLKSDGFANRNFMQLIHDDSLTFKEDIQKAQVSGQGDSLHEHIANLAGSPAIKKGILQTVKVVDELVKVMGRHKPENIVIEMARENQTTQKGQKNSRERMKRIEEGIKELGSQILKEHPVENTQLQNEKLYLYYLQNGRDMYVDQELDINRLSDYDVDHIVPQSFLKDDSIDNKVLTRSDKARGKSDNVPSEEVVKKMKNYWRQLLNAKLITQRKFDNLTKAERGGLSELDKAGFIKRQLVETRQITKHVAQILDSRMNTKYDENDKLIREVKVITLKSKLVSDFRKDFQFYKVREINNYHHAHDAYLNAVVGTALIKKYPKLESEFVYGDYKVYDVRKMIAKSEQEIGKATAKYFFYSNIMNFFKTEITLANGEIRKRPLIETNGETGEIVWDKGRDFATVRKVLSMPQVNIVKKTEVQTGGFSKESILPKRNSDKLIARKKDWDPKKYGGFDSPTVAYSVLVVAKVEKGKSKKLKSVKELLGITIMERSSFEKNPIDFLEAKGYKEVKKDLIIKLPKYSLFELENGRKRMLASAGELQKGNELALPSKYVNFLYLASHYEKLKGSPEDNEQKQLFVEQHKHYLDEIIEQISEFSKRVILADANLDKVLSAYNKHRDKPIREQAENIIHLFTLTNLGAPAAFKYFDTTIDRKRYTSTKEVLDATLIHQSITGLYETRIDLSQLGGDGGGSSPAPGGGGGTAPLEEEYRLFLEAPIQNVTLLEQWKREIPKVWAEINPPGLASTQAPIHVQLLSTALPVRVRQYPITLEAKRSLRETIRKFRAAGILRPVHSPWNTPLLPVRKSGTSEYRMVQDLREVNKRVETIHPTVPNPYTLLSLLPPDRIWYSVLDLKDAFFCIPLAPESQLIFAFEWADAEEGESGQLTWTRLPQGFKNSPTLFNEALNRDLQGFRLDHPSVSLLQYVDDLLIAADTQAACLSATRDLLMTLAELGYRVSGKKAQLCQEEVTYLGFKIHKGSRSLSNSRTQAILQIPVPKTKRQVREFLGTIGYCRLWIPGFAELAQPLYAATRPGNDPLVWGEKEEEAFQSLKLALTQPPALALPSLDKPFQLFVEETSGAAKGVLTQALGPWKRPVAYLSKRLDPVAAGWPRCLRAIAAAALLTREASKLTFGQDIEITSSHNLESLLRSPPDKWLTNARITQYQVLLLDPPRVRFKQTAALNPATLLPETDDTLPIHHCLDTLDSLTSTRPDLTDQPLAQAEATLFTDGSSYIRDGKRYAGAAVVTLDSVIWAEPLPIGTSAQKAELIALTKALEWSKDKSVNIYTDSRYAFATLHVHGMIYRERGWLTAGGKAIKNAPEILALLTAVWLPKRVAVMHCKGHQKDDAPTSTGNRRADEVAREVAIRPLSTQATISAGKRTADGSEFEKRTADGSEFESPKKKAKVE

SEQ ID NO: 7403 - protein, 2096 aa, synthetic construct
MPAAKRVKLDGGDKKYSIGLDIGTNSVGWAVITDEYKVPSKKFKVLGNTDRHSIKKNLIGALLFDSGETAEATRLKRTARRRYTRRKNRICYLQEIFSNEMAKVDDSFFHRLEESFLVEEDKKHERHPIFGNIVDEVAYHEKYPTIYHLRKKLVDSTDKADLRLIYLALAHMIKFRGHFLIEGDLNPDNSDVDKLFIQLVQTYNQLFEENPINASGVDAKAILSARLSKSRRLENLIAQLPGEKKNGLFGNLIALSLGLTPNFKSNFDLAEDAKLQLSKDTYDDDLDNLLAQIGDQYADLFLAAKNLSDAILLSDILRVNTEITKAPLSASMIKRYDEHHQDLTLLKALVRQQLPEKYKEIFFDQSKNGYAGYIDGGASQEEFYKFIKPILEKMDGTEELLVKLNREDLLRKQRTFDNGSIPHQIHLGELHAILRRQEDFYPFLKDNREKIEKILTFRIPYYVGPLARGNSRFAWMTRKSEETITPWNFEEVVDKGASAQSFIERMTNFDKNLPNEKVLPKHSLLYEYFTVYNELTKVKYVTEGMRKPAFLSGEQKKAIVDLLFKTNRKVTVKQLKEDYFKKIECFDSVEISGVEDRFNASLGTYHDLLKIIKDKDFLDNEENEDILEDIVLTLTLFEDREMIEERLKTYAHLFDDKVMKQLKRRRYTGWGRLSRKLINGIRDKQSGKTILDFLKSDGFANRNFMQLIHDDSLTFKEDIQKAQVSGQGDSLHEHIANLAGSPAIKKGILQTVKVVDELVKVMGRHKPENIVIEMARENQTTQKGQKNSRERMKRIEEGIKELGSQILKEHPVENTQLQNEKLYLYYLQNGRDMYVDQELDINRLSDYDVDHIVPQSFLKDDSIDNKVLTRSDKARGKSDNVPSEEVVKKMKNYWRQLLNAKLITQRKFDNLTKAERGGLSELDKAGFIKRQLVETRQITKHVAQILDSRMNTKYDENDKLIREVKVITLKSKLVSDFRKDFQFYKVREINNYHHAHDAYLNAVVGTALIKKYPKLESEFVYGDYKVYDVRKMIAKSEQEIGKATAKYFFYSNIMNFFKTEITLANGEIRKRPLIETNGETGEIVWDKGRDFATVRKVLSMPQVNIVKKTEVQTGGFSKESILPKRNSDKLIARKKDWDPKKYGGFDSPTVAYSVLVVAKVEKGKSKKLKSVKELLGITIMERSSFEKNPIDFLEAKGYKEVKKDLIIKLPKYSLFELENGRKRMLASAGELQKGNELALPSKYVNFLYLASHYEKLKGSPEDNEQKQLFVEQHKHYLDEIIEQISEFSKRVILADANLDKVLSAYNKHRDKPIREQAENIIHLFTLTNLGAPAAFKYFDTTIDRKRYTSTKEVLDATLIHQSITGLYETRIDLSQLGGDGGGSSPAPGGGGGTAPLEEEYRLFLEAPIQNVTLLEQWKREIPKVWAEINPPGLASTQAPIHVQLLSTALPVRVRQYPITLEAKRSLRETIRKFRAAGILRPVHSPWNTPLLPVRKSGTSEYRMVQDLREVNKRVETIHPTVPNPYTLLSLLPPDRIWYSVLDLKDAFFCIPLAPESQLIFAFEWADAEEGESGQLTWTRLPQGFKNSPTLFNEALNRDLQGFRLDHPSVSLLQYVDDLLIAADTQAACLSATRDLLMTLAELGYRVSGKKAQLCQEEVTYLGFKIHKGSRSLSNSRTQAILQIPVPKTKRQVREFLGKIGYCRLFIPGFAELAQPLYAATRPGNDPLVWGEKEEEAFQSLKLALTQPPALALPSLDKPFQLFVEETSGAAKGVLTQALGPWKRPVAYLSKRLDPVAAGWPRCLRAIAAAALLTREASKLTFGQDIEITSSHNLESLLRSPPDKWLTNARITQYQVLLLDPPRVRFKQTAALNPATLLPETDDTLPIHHCLDTLDSLTSTRPDLTDQPLAQAEATLFTDGSSYIRDGKRYAGAAVVTLDSVIWAEPLPIGTSAQKAELIALTKALEWSKDKSVNIYTDSRYAFATLHVHGMIYRERGWLTAGGKAIKNAPEILALLTAVWLPKRVAVMHCKGHQKDDAPTSTGNRRADEVAREVAIRPLSTQATISAGKRTADGSEFEKRTADGSEFESPKKKAKVE

SEQ ID NO: 7404 - protein, 2092 aa, synthetic construct
MPAAKRVKLDGGDKKYSIGLDIGTNSVGWAVITDEYKVPSKKFKVLGNTDRHSIKKNLIGALLFDSGETAEATRLKRTARRRYTRRKNRICYLQEIFSNEMAKVDDSFFHRLEESFLVEEDKKHERHPIFGNIVDEVAYHEKYPTIYHLRKKLVDSTDKADLRLIYLALAHMIKFRGHFLIEGDLNPDNSDVDKLFIQLVQTYNQLFEENPINASGVDAKAILSARLSKSRRLENLIAQLPGEKKNGLFGNLIALSLGLTPNFKSNFDLAEDAKLQLSKDTYDDDLDNLLAQIGDQYADLFLAAKNLSDAILLSDILRVNTEITKAPLSASMIKRYDEHHQDLTLLKALVRQQLPEKYKEIFFDQSKNGYAGYIDGGASQEEFYKFIKPILEKMDGTEELLVKLNREDLLRKQRTFDNGSIPHQIHLGELHAILRRQEDFYPFLKDNREKIEKILTFRIPYYVGPLARGNSRFAWMTRKSEETITPWNFEEVVDKGASAQSFIERMTNFDKNLPNEKVLPKHSLLYEYFTVYNELTKVKYVTEGMRKPAFLSGEQKKAIVDLLFKTNRKVTVKQLKEDYFKKIECFDSVEISGVEDRFNASLGTYHDLLKIIKDKDFLDNEENEDILEDIVLTLTLFEDREMIEERLKTYAHLFDDKVMKQLKRRRYTGWGRLSRKLINGIRDKQSGKTILDFLKSDGFANRNFMQLIHDDSLTFKEDIQKAQVSGQGDSLHEHIANLAGSPAIKKGILQTVKVVDELVKVMGRHKPENIVIEMARENQTTQKGQKNSRERMKRIEEGIKELGSQILKEHPVENTQLQNEKLYLYYLQNGRDMYVDQELDINRLSDYDVDHIVPQSFLKDDSIDNKVLTRSDKARGKSDNVPSEEVVKKMKNYWRQLLNAKLITQRKFDNLTKAERGGLSELDKAGFIKRQLVETRQITKHVAQILDSRMNTKYDENDKLIREVKVITLKSKLVSDFRKDFQFYKVREINNYHHAHDAYLNAVVGTALIKKYPKLESEFVYGDYKVYDVRKMIAKSEQEIGKATAKYFFYSNIMNFFKTEITLANGEIRKRPLIETNGETGEIVWDKGRDFATVRKVLSMPQVNIVKKTEVQTGGFSKESILPKRNSDKLIARKKDWDPKKYGGFDSPTVAYSVLVVAKVEKGKSKKLKSVKELLGITIMERSSFEKNPIDFLEAKGYKEVKKDLIIKLPKYSLFELENGRKRMLASAGELQKGNELALPSKYVNFLYLASHYEKLKGSPEDNEQKQLFVEQHKHYLDEIIEQISEFSKRVILADANLDKVLSAYNKHRDKPIREQAENIIHLFTLTNLGAPAAFKYFDTTIDRKRYTSTKEVLDATLIHQSITGLYETRIDLSQLGGDGGGSSPAPGGGGGVLNLEEEYRLHEKPVPSSIDPSWLQLFPTVWAERAGMGLANQVPPVVVELRSGASPVAVRQYPMSKEAREGIRPHIQKFLDLGVLVPCRSPWNTPLLPVKKPGTNDYRPVQDLREINKRVQDIHPTVPNPYNLLSSLPPSYTWYSVLDLKDAFFCLRLHPNSQPLFAFEWKDPEKGNTGQLTWTRLPQGFKNSPTLFNEALHRDLAPFRALNPQVVLLQYVDDLLVAAPTYEDCKKGTQKLLQELSKLGYRVSAKKAQLCQREVTYLGYLLKEGKRWLTPARKATVMKIPVPTTPRQVREFLGKAGFCRLFIPGFASLAAPLYPLTKPSIPFIWTEEHQQAFDHIKKALLSAPALALPDLTKPFTLYIDERAGVARGVLTQTLGPWRRPVAYLSKKLDPVASGWPTCLKAVAAVALLLKDADKLTLGQNVTVIASHSLESIVRQPPDRWMTNARMTHYQSLLLNERVSFAPPAVLNPATLLPVESEATPVHRCSEILAEETGTRRDLEDQPLPGVPTWYTDGSSFITEGKRRAGAPIVDGKRTVWASSLPEGTSAQKAELVALTQALRLAEGKNINIYTDSRYAFATAHIHGAIYKQRGWLTSAGKDIKNKEEILALLEAIHLPRRVAIIHCPGHQRGSNPVATGNRRADEAAKQAALSTRVLAGTTKPAGKRTADGSEFEKRTADGSEFESPKKKAKVE

SEQ ID NO: 7405 - protein, 2125 aa, synthetic construct
MPAAKRVKLDGGDKKYSIGLDIGTNSVGWAVITDEYKVPSKKFKVLGNTDRHSIKKNLIGALLFDSGETAEATRLKRTARRRYTRRKNRICYLQEIFSNEMAKVDDSFFHRLEESFLVEEDKKHERHPIFGNIVDEVAYHEKYPTIYHLRKKLVDSTDKADLRLIYLALAHMIKFRGHFLIEGDLNPDNSDVDKLFIQLVQTYNQLFEENPINASGVDAKAILSARLSKSRRLENLIAQLPGEKKNGLFGNLIALSLGLTPNFKSNFDLAEDAKLQLSKDTYDDDLDNLLAQIGDQYADLFLAAKNLSDAILLSDILRVNTEITKAPLSASMIKRYDEHHQDLTLLKALVRQQLPEKYKEIFFDQSKNGYAGYIDGGASQEEFYKFIKPILEKMDGTEELLVKLNREDLLRKQRTFDNGSIPHQIHLGELHAILRRQEDFYPFLKDNREKIEKILTFRIPYYVGPLARGNSRFAWMTRKSEETITPWNFEEVVDKGASAQSFIERMTNFDKNLPNEKVLPKHSLLYEYFTVYNELTKVKYVTEGMRKPAFLSGEQKKAIVDLLFKTNRKVTVKQLKEDYFKKIECFDSVEISGVEDRFNASLGTYHDLLKIIKDKDFLDNEENEDILEDIVLTLTLFEDREMIEERLKTYAHLFDDKVMKQLKRRRYTGWGRLSRKLINGIRDKQSGKTILDFLKSDGFANRNFMQLIHDDSLTFKEDIQKAQVSGQGDSLHEHIANLAGSPAIKKGILQTVKVVDELVKVMGRHKPENIVIEMARENQTTQKGQKNSRERMKRIEEGIKELGSQILKEHPVENTQLQNEKLYLYYLQNGRDMYVDQELDINRLSDYDVDHIVPQSFLKDDSIDNKVLTRSDKARGKSDNVPSEEVVKKMKNYWRQLLNAKLITQRKFDNLTKAERGGLSELDKAGFIKRQLVETRQITKHVAQILDSRMNTKYDENDKLIREVKVITLKSKLVSDFRKDFQFYKVREINNYHHAHDAYLNAVVGTALIKKYPKLESEFVYGDYKVYDVRKMIAKSEQEIGKATAKYFFYSNIMNFFKTEITLANGEIRKRPLIETNGETGEIVWDKGRDFATVRKVLSMPQVNIVKKTEVQTGGFSKESILPKRNSDKLIARKKDWDPKKYGGFDSPTVAYSVLVVAKVEKGKSKKLKSVKELLGITIMERSSFEKNPIDFLEAKGYKEVKKDLIIKLPKYSLFELENGRKRMLASAGELQKGNELALPSKYVNFLYLASHYEKLKGSPEDNEQKQLFVEQHKHYLDEIIEQISEFSKRVILADANLDKVLSAYNKHRDKPIREQAENIIHLFTLTNLGAPAAFKYFDTTIDRKRYTSTKEVLDATLIHQSITGLYETRIDLSQLGGDGGGSSPAPGGGGGLLGRDLLTKLKAQIQFSTEGPQVTWEDRPAMCLVLNLEEEYRLHEKPVPPSIDPSWLQLFPMVWAEKAGMGLANQVPPVVVELKSDASPVAVRQYPMSKEAREGIRPHIQRFLDLGILVPCQSPWNTPLLPVKKPGTNDYRPVQDLREVNKRVQDIHPTVPNPYNLLSSLPPSHTWYSVLDLKDAFFCLKLHPNSQPLFAFEWRDPEKGNTGQLTWTRLPQGFKNSPTLFDEALHRDLASFRALNPQVVMLQYVDDLLVAAPTYRDCKEGTRRLLQELSKLGYRVSAKKAQLCREEVTYLGYLLKGGKRWLTPARKATVMKIPTPTTPRQVREFLGTAGFCRLWIPGFASLAAPLYPLTREKVPFTWTEAHQEAFGRIKEALLSAPALALPDLTKPFALYVDEKEGVARGVLTQTLGPWRRPVAYLSKKLDPVASGWPTCLKAIAAVALLLKDADKLTLGQNVLVIAPHNLESIVRQPPDRWMTNARMTHYQSLLLNERVSFAPPAILNPATLLPVESDDTPIHICSEILAEETGTRPDLRDQPLPGVPAWYTDGSSFIMDGRRQAGAAIVDNKRTVWASNLPEGTSAQKAELIALTQALRLAEGKSINIYTDSRYAFATAHVHGAIYKQRGLLTSAGKDIKNKEEILALLEAIHLPKRVAIIHCPGHQRGTDPVATGNRKADEAAKQAAQSTRILTETTKNAGKRTADGSEFEKRTADGSEFESPKKKAKVE

SEQ ID NO: 7406 - protein, 2216 aa, synthetic construct
MPAAKRVKLDGGDKKYSIGLDIGTNSVGWAVITDEYKVPSKKFKVLGNTDRHSIKKNLIGALLFDSGETAEATRLKRTARRRYTRRKNRICYLQEIFSNEMAKVDDSFFHRLEESFLVEEDKKHERHPIFGNIVDEVAYHEKYPTIYHLRKKLVDSTDKADLRLIYLALAHMIKFRGHFLIEGDLNPDNSDVDKLFIQLVQTYNQLFEENPINASGVDAKAILSARLSKSRRLENLIAQLPGEKKNGLFGNLIALSLGLTPNFKSNFDLAEDAKLQLSKDTYDDDLDNLLAQIGDQYADLFLAAKNLSDAILLSDILRVNTEITKAPLSASMIKRYDEHHQDLTLLKALVRQQLPEKYKEIFFDQSKNGYAGYIDGGASQEEFYKFIKPILEKMDGTEELLVKLNREDLLRKQRTFDNGSIPHQIHLGELHAILRRQEDFYPFLKDNREKIEKILTFRIPYYVGPLARGNSRFAWMTRKSEETITPWNFEEVVDKGASAQSFIERMTNFDKNLPNEKVLPKHSLLYEYFTVYNELTKVKYVTEGMRKPAFLSGEQKKAIVDLLFKTNRKVTVKQLKEDYFKKIECFDSVEISGVEDRFNASLGTYHDLLKIIKDKDFLDNEENEDILEDIVLTLTLFEDREMIEERLKTYAHLFDDKVMKQLKRRRYTGWGRLSRKLINGIRDKQSGKTILDFLKSDGFANRNFMQLIHDDSLTFKEDIQKAQVSGQGDSLHEHIANLAGSPAIKKGILQTVKVVDELVKVMGRHKPENIVIEMARENQTTQKGQKNSRERMKRIEEGIKELGSQILKEHPVENTQLQNEKLYLYYLQNGRDMYVDQELDINRLSDYDVDHIVPQSFLKDDSIDNKVLTRSDKARGKSDNVPSEEVVKKMKNYWRQLLNAKLITQRKFDNLTKAERGGLSELDKAGFIKRQLVETRQITKHVAQILDSRMNTKYDENDKLIREVKVITLKSKLVSDFRKDFQFYKVREINNYHHAHDAYLNAVVGTALIKKYPKLESEFVYGDYKVYDVRKMIAKSEQEIGKATAKYFFYSNIMNFFKTEITLANGEIRKRPLIETNGETGEIVWDKGRDFATVRKVLSMPQVNIVKKTEVQTGGFSKESILPKRNSDKLIARKKDWDPKKYGGFDSPTVAYSVLVVAKVEKGKSKKLKSVKELLGITIMERSSFEKNPIDFLEAKGYKEVKKDLIIKLPKYSLFELENGRKRMLASAGELQKGNELALPSKYVNFLYLASHYEKLKGSPEDNEQKQLFVEQHKHYLDEIIEQISEFSKRVILADANLDKVLSAYNKHRDKPIREQAENIIHLFTLTNLGAPAAFKYFDTTIDRKRYTSTKEVLDATLIHQSITGLYETRIDLSQLGGDGGGSSPAPGGGGGTLGDQGSRGSDPLPEPRVTLTVEGIPTEFLVNTGAEHSVLTKPMGKMGSKRTVVAGATGSKVYPWTTKRLLKIGQKQVTHSFLVIPECPAPLLGRDLLTKLKAQIQFSTEGPQVTWEDRPAMCLVLNLEEEYRLHEKPVPPSIDPSWLQLFPMVWAEKAGMGLANQVPPVVVELKSDASPVAVRQYPMSKEAREGIRPHIQRFLDLGILVPCQSPWNTPLLPVKKPGTNDYRPVQDLREVNKRVQDIHPTVPNPYNLLSSLPPSHTWYSVLDLKDAFFCLKLHPNSQPLFAFEWRDPEKGNTGQLTWTRLPQGFKNSPTLFNEALHRDLASFRALNPQVVMLQYVDDLLVAAPTYRDCKEGTRRLLQELSKLGYRVSAKKAQLCREEVTYLGYLLKGGKRWLTPARKATVMKIPTPTTPRQVREFLGTAGFCRLWIPGFASLAAPLYPLTRPKVPFTWTEAHQEAFGRIKEALLSAPALALPDLTKPFALYVDEKEGVARGVLTQTLGPWRRPVAYLSKKLDPVASGWPTCLKAIAAVALLLKDADKLTLGQNVLVIAPHNLESIVRQPPDRWMTNARMTHYQSLLLNERVSFAPPAILNPATLLPVESDDTPIHICSEILAEETGTRPDLRDQPLPGVPAWYTDGSSFIMDGRRQAGAAIVDNKRTVWASNLPEGTSAQKAELIALTQALRLAEGKSINIYTDSRYAFATAHVHGAIYKQRGWLTSAGKDIKNKEEILALLEAIHLPKRVAIIHCPGHQRGTDPVATGNRKADEAAKQAAQSTRILTETTKNAGKRTADGSEFEKRTADGSEFESPKKKAKVE

SEQ ID NO: 7407 - protein, 2216 aa, synthetic construct
MPAAKRVKLDGGDKKYSIGLDIGTNSVGWAVITDEYKVPSKKFKVLGNTDRHSIKKNLIGALLFDSGETAEATRLKRTARRRYTRRKNRICYLQEIFSNEMAKVDDSFFHRLEESFLVEEDKKHERHPIFGNIVDEVAYHEKYPTIYHLRKKLVDSTDKADLRLIYLALAHMIKFRGHFLIEGDLNPDNSDVDKLFIQLVQTYNQLFEENPINASGVDAKAILSARLSKSRRLENLIAQLPGEKKNGLFGNLIALSLGLTPNFKSNFDLAEDAKLQLSKDTYDDDLDNLLAQIGDQYADLFLAAKNLSDAILLSDILRVNTEITKAPLSASMIKRYDEHHQDLTLLKALVRQQLPEKYKEIFFDQSKNGYAGYIDGGASQEEFYKFIKPILEKMDGTEELLVKLNREDLLRKQRTFDNGSIPHQIHLGELHAILRRQEDFYPFLKDNREKIEKILTFRIPYYVGPLARGNSRFAWMTRKSEETITPWNFEEVVDKGASAQSFIERMTNFDKNLPNEKVLPKHSLLYEYFTVYNELTKVKYVTEGMRKPAFLSGEQKKAIVDLLFKTNRKVTVKQLKEDYFKKIECFDSVEISGVEDRFNASLGTYHDLLKIIKDKDFLDNEENEDILEDIVLTLTLFEDREMIEERLKTYAHLFDDKVMKQLKRRRYTGWGRLSRKLINGIRDKQSGKTILDFLKSDGFANRNFMQLIHDDSLTFKEDIQKAQVSGQGDSLHEHIANLAGSPAIKKGILQTVKVVDELVKVMGRHKPENIVIEMARENQTTQKGQKNSRERMKRIEEGIKELGSQILKEHPVENTQLQNEKLYLYYLQNGRDMYVDQELDINRLSDYDVDHIVPQSFLKDDSIDNKVLTRSDKARGKSDNVPSEEVVKKMKNYWRQLLNAKLITQRKFDNLTKAERGGLSELDKAGFIKRQLVETRQITKHVAQILDSRMNTKYDENDKLIREVKVITLKSKLVSDFRKDFQFYKVREINNYHHAHDAYLNAVVGTALIKKYPKLESEFVYGDYKVYDVRKMIAKSEQEIGKATAKYFFYSNIMNFFKTEITLANGEIRKRPLIETNGETGEIVWDKGRDFATVRKVLSMPQVNIVKKTEVQTGGFSKESILPKRNSDKLIARKKDWDPKKYGGFDSPTVAYSVLVVAKVEKGKSKKLKSVKELLGITIMERSSFEKNPIDFLEAKGYKEVKKDLIIKLPKYSLFELENGRKRMLASAGELQKGNELALPSKYVNFLYLASHYEKLKGSPEDNEQKQLFVEQHKHYLDEIIEQISEFSKRVILADANLDKVLSAYNKHRDKPIREQAENIIHLFTLTNLGAPAAFKYFDTTIDRKRYTSTKEVLDATLIHQSITGLYETRIDLSQLGGDGGGSSPAPGGGGGTLGDQGSRGSDPLPEPRVTLTVEGIPTEFLVNTGAEHSVLTKPMGKMGSKRTVVAGATGSKVYPWTTKRLLKIGQKQVTHSFLVIPECPAPLLGRDLLTKLKAQIQFSTEGPQVTWEDRPAMCLVLNLEEEYRLHEKPVPPSIDPSWLQLFPMVWAEKAGMGLANQVPPVVVELKSDASPVAVRQYPMSKEAREGIRPHIQRFLDLGILVPCQSPWNTPLLPVKKPGTNDYRPVQDLREVNKRVQDIHPTVPNPYNLLSSLPPSHTWYSVLDLKDAFFCLKLHPNSQPLFAFEWRDPEKGNTGQLTWTRLPQGFKNSPTLFNEALHRDLASFRALNPQVVMLQYVDDLLVAAPTYRDCKEGTRRLLQELSKLGYRVSAKKAQLCREEVTYLGYLLKGGKRWLTPARKATVMKIPTPTTPRQVREFLGKAGFCRLFIPGFASLAAPLYPLTRPKVPFTWTEAHQEAFGRIKEALLSAPALALPDLTKPFALYVDEKEGVARGVLTQTLGPWRRPVAYLSKKLDPVASGWPTCLKAIAAVALLLKDADKLTLGQNVLVIAPHNLESIVRQPPDRWMTNARMTHYQSLLLNERVSFAPPAILNPATLLPVESDDTPIHICSEILAEETGTRPDLRDQPLPGVPAWYTDGSSFIMDGRRQAGAAIVDNKRTVWASNLPEGTSAQKAELIALTQALRLAEGKSINIYTDSRYAFATAHVHGAIYKQRGWLTSAGKDIKNKEEILALLEAIHLPKRVAIIHCPGHQRGTDPVATGNRKADEAAKQAAQSTRILTETTKNAGKRTADGSEFEKRTADGSEFESPKKKAKVE

SEQ ID NO: 7408 - protein, 2094 aa, synthetic construct
MPAAKRVKLDGGDKKYSIGLDIGTNSVGWAVITDEYKVPSKKFKVLGNTDRHSIKKNLIGALLFDSGETAEATRLKRTARRRYTRRKNRICYLQEIFSNEMAKVDDSFFHRLEESFLVEEDKKHERHPIFGNIVDEVAYHEKYPTIYHLRKKLVDSTDKADLRLIYLALAHMIKFRGHFLIEGDLNPDNSDVDKLFIQLVQTYNQLFEENPINASGVDAKAILSARLSKSRRLENLIAQLPGEKKNGLFGNLIALSLGLTPNFKSNFDLAEDAKLQLSKDTYDDDLDNLLAQIGDQYADLFLAAKNLSDAILLSDILRVNTEITKAPLSASMIKRYDEHHQDLTLLKALVRQQLPEKYKEIFFDQSKNGYAGYIDGGASQEEFYKFIKPILEKMDGTEELLVKLNREDLLRKQRTFDNGSIPHQIHLGELHAILRRQEDFYPFLKDNREKIEKILTFRIPYYVGPLARGNSRFAWMTRKSEETITPWNFEEVVDKGASAQSFIERMTNFDKNLPNEKVLPKHSLLYEYFTVYNELTKVKYVTEGMRKPAFLSGEQKKAIVDLLFKTNRKVTVKQLKEDYFKKIECFDSVEISGVEDRFNASLGTYHDLLKIIKDKDFLDNEENEDILEDIVLTLTLFEDREMIEERLKTYAHLFDDKVMKQLKRRRYTGWGRLSRKLINGIRDKQSGKTILDFLKSDGFANRNFMQLIHDDSLTFKEDIQKAQVSGQGDSLHEHIANLAGSPAIKKGILQTVKVVDELVKVMGRHKPENIVIEMARENQTTQKGQKNSRERMKRIEEGIKELGSQILKEHPVENTQLQNEKLYLYYLQNGRDMYVDQELDINRLSDYDVDHIVPQSFLKDDSIDNKVLTRSDKARGKSDNVPSEEVVKKMKNYWRQLLNAKLITQRKFDNLTKAERGGLSELDKAGFIKRQLVETRQITKHVAQILDSRMNTKYDENDKLIREVKVITLKSKLVSDFRKDFQFYKVREINNYHHAHDAYLNAVVGTALIKKYPKLESEFVYGDYKVYDVRKMIAKSEQEIGKATAKYFFYSNIMNFFKTEITLANGEIRKRPLIETNGETGEIVWDKGRDFATVRKVLSMPQVNIVKKTEVQTGGFSKESILPKRNSDKLIARKKDWDPKKYGGFDSPTVAYSVLVVAKVEKGKSKKLKSVKELLGITIMERSSFEKNPIDFLEAKGYKEVKKDLIIKLPKYSLFELENGRKRMLASAGELQKGNELALPSKYVNFLYLASHYEKLKGSPEDNEQKQLFVEQHKHYLDEIIEQISEFSKRVILADANLDKVLSAYNKHRDKPIREQAENIIHLFTLTNLGAPAAFKYFDTTIDRKRYTSTKEVLDATLIHQSITGLYETRIDLSQLGGDGGGSSPAPGGGGGTLNLEDEYRLYETSAEPEVSPGSTWLSDFPQAWAETGGMGLAVRQAPLIIPLKATSTPVSIKQYPMSQEAKLGIKPHIQRLLDQGILVPCQSPWNTPLLPVKKPGTNDYRPVQDLREVNKRVEDIHPTVPNPYNLLSGLPPSHRWYTVLDLKDAFFCLRLHPTSQPLFAFEWRDPGMGISGQLTWTRLPQGFKNSPTLFNEALHRDLADFRIQHPDLILLQYVDDILLAATSELDCQQGTRALLLTLGNLGYRASAKKAQLCQKQVKYLGYLLKEGQRWLTEARKETVMGQPTPKTPRQLREFLGTAGFCRLWIPGFAEMAAPLYPLTKPGTLFNWGPDQQKAYQEIKQALLTAPALGLPDLTKPFELFVDEKQGYAKGVLTQKLGPWRRPVAYLSKKLDPVAAGWPPCLRMVAAIAVLRKDAGKLTMGQPLVILAPHAVEALVKQPPDRWLSNARMTHYQAMLLDTDRVQFGPVVALNPATLLPLPEEGAPHDCLEILAETHGTRPDLTDQPIPDADHTWYTDGSSFLQEGQRKAGAAVTTETEVIWARALPAGTSAQRAELIALTQALKMAEGKRLNVYTDSRYAFATAHIHGEIYRRRGWLTSEGREIKNKSEILALLKALFLPKRLSIIHCLGHQKGDSAEARGNRLADQAAREAAIKTPPDTSTLLAGKRTADGSEFEKRTADGSEFESPKKKAKVE

SEQ ID NO: 7409 - protein, 2094 aa, synthetic construct
MPAAKRVKLDGGDKKYSIGLDIGTNSVGWAVITDEYKVPSKKFKVLGNTDRHSIKKNLIGALLFDSGETAEATRLKRTARRRYTRRKNRICYLQEIFSNEMAKVDDSFFHRLEESFLVEEDKKHERHPIFGNIVDEVAYHEKYPTIYHLRKKLVDSTDKADLRLIYLALAHMIKFRGHFLIEGDLNPDNSDVDKLFIQLVQTYNQLFEENPINASGVDAKAILSARLSKSRRLENLIAQLPGEKKNGLFGNLIALSLGLTPNFKSNFDLAEDAKLQLSKDTYDDDLDNLLAQIGDQYADLFLAAKNLSDAILLSDILRVNTEITKAPLSASMIKRYDEHHQDLTLLKALVRQQLPEKYKEIFFDQSKNGYAGYIDGGASQEEFYKFIKPILEKMDGTEELLVKLNREDLLRKQRTFDNGSIPHQIHLGELHAILRRQEDFYPFLKDNREKIEKILTFRIPYYVGPLARGNSRFAWMTRKSEETITPWNFEEVVDKGASAQSFIERMTNFDKNLPNEKVLPKHSLLYEYFTVYNELTKVKYVTEGMRKPAFLSGEQKKAIVDLLFKTNRKVTVKQLKEDYFKKIECFDSVEISGVEDRFNASLGTYHDLLKIIKDKDFLDNEENEDILEDIVLTLTLFEDREMIEERLKTYAHLFDDKVMKQLKRRRYTGWGRLSRKLINGIRDKQSGKTILDFLKSDGFANRNFMQLIHDDSLTFKEDIQKAQVSGQGDSLHEHIANLAGSPAIKKGILQTVKVVDELVKVMGRHKPENIVIEMARENQTTQKGQKNSRERMKRIEEGIKELGSQILKEHPVENTQLQNEKLYLYYLQNGRDMYVDQELDINRLSDYDVDHIVPQSFLKDDSIDNKVLTRSDKARGKSDNVPSEEVVKKMKNYWRQLLNAKLITQRKFDNLTKAERGGLSELDKAGFIKRQLVETRQITKHVAQILDSRMNTKYDENDKLIREVKVITLKSKLVSDFRKDFQFYKVREINNYHHAHDAYLNAVVGTALIKKYPKLESEFVYGDYKVYDVRKMIAKSEQEIGKATAKYFFYSNIMNFFKTEITLANGEIRKRPLIETNGETGEIVWDKGRDFATVRKVLSMPQVNIVKKTEVQTGGFSKESILPKRNSDKLIARKKDWDPKKYGGFDSPTVAYSVLVVAKVEKGKSKKLKSVKELLGITIMERSSFEKNPIDFLEAKGYKEVKKDLIIKLPKYSLFELENGRKRMLASAGELQKGNELALPSKYVNFLYLASHYEKLKGSPEDNEQKQLFVEQHKHYLDEIIEQISEFSKRVILADANLDKVLSAYNKHRDKPIREQAENIIHLFTLTNLGAPAAFKYFDTTIDRKRYTSTKEVLDATLIHQSITGLYETRIDLSQLGGDGGGSSPAPGGGGGTLNIEDEYRLHETSKGPDVPLGSTWLSDFPQAWAETGGMGLAFRQAPLIISLKATSTPVSIKQYPMSQEARLGIKPHIQRLLDQGILVPCQSPWNTPLLPVKKPGTNDYRPVQDLREVNKRVEDIHPTVPNPYNLLSGLPPSHQWYTVLDLKDAFFCLRLHPTSQSLFAFEWKDPEMGISGQLTWTRLPQGFKNSPTLFNEALHRDLADFRIQHPDLILLQYVDDLLLAATSELDCQQGTRALLQTLGDLGYRASAKKAQICQKQVKYLGYLLKEGQRWLTEARKETVMGQPTPKTPRQLREFLGTAGLCRLWIPGFAEMAAPLYPLTKPGTLFKWGPDQQKAYQEIKQALLTAPALGLPDLTKPFELFVDEKQGYAKGVLTQKLGPWRRPVAYLSKKLDPVAAGWPPCLRMVAAIAVLTKDVGKLTMGQPLVILAPHAVEALVKQPPDRWLSNARMTHYQALLLDTDRVQFGPIVALNPATLLPLPEEGLQHDCLDILAEAHGTRPDLTDQPLPDADHTWYTDGSSFLQEGQRRAGAAVTTETEVIWAKALPAGTSAQRAELIALTQALKMAAGKKLNVYTDSRYAFATAHIHGEIYRRRGWLTSEGKEIKNKDEILALLKALFLPKRLSIIHCPGHQKGNHAEARGNRMADQAAREVATRETPETSTLLAGKRTADGSEFEKRTADGSEFESPKKKAKVE

SEQ ID NO: 7410 - protein, 2094 aa, synthetic construct
MPAAKRVKLDGGDKKYSIGLDIGTNSVGWAVITDEYKVPSKKFKVLGNTDRHSIKKNLIGALLFDSGETAEATRLKRTARRRYTRRKNRICYLQEIFSNEMAKVDDSFFHRLEESFLVEEDKKHERHPIFGNIVDEVAYHEKYPTIYHLRKKLVDSTDKADLRLIYLALAHMIKFRGHFLIEGDLNPDNSDVDKLFIQLVQTYNQLFEENPINASGVDAKAILSARLSKSRRLENLIAQLPGEKKNGLFGNLIALSLGLTPNFKSNFDLAEDAKLQLSKDTYDDDLDNLLAQIGDQYADLFLAAKNLSDAILLSDILRVNTEITKAPLSASMIKRYDEHHQDLTLLKALVRQQLPEKYKEIFFDQSKNGYAGYIDGGASQEEFYKFIKPILEKMDGTEELLVKLNREDLLRKQRTFDNGSIPHQIHLGELHAILRRQEDFYPFLKDNREKIEKILTFRIPYYVGPLARGNSRFAWMTRKSEETITPWNFEEVVDKGASAQSFIERMTNFDKNLPNEKVLPKHSLLYEYFTVYNELTKVKYVTEGMRKPAFLSGEQKKAIVDLLFKTNRKVTVKQLKEDYFKKIECFDSVEISGVEDRFNASLGTYHDLLKIIKDKDFLDNEENEDILEDIVLTLTLFEDREMIEERLKTYAHLFDDKVMKQLKRRRYTGWGRLSRKLINGIRDKQSGKTILDFLKSDGFANRNFMQLIHDDSLTFKEDIQKAQVSGQGDSLHEHIANLAGSPAIKKGILQTVKVVDELVKVMGRHKPENIVIEMARENQTTQKGQKNSRERMKRIEEGIKELGSQILKEHPVENTQLQNEKLYLYYLQNGRDMYVDQELDINRLSDYDVDHIVPQSFLKDDSIDNKVLTRSDKARGKSDNVPSEEVVKKMKNYWRQLLNAKLITQRKFDNLTKAERGGLSELDKAGFIKRQLVETRQITKHVAQILDSRMNTKYDENDKLIREVKVITLKSKLVSDFRKDFQFYKVREINNYHHAHDAYLNAVVGTALIKKYPKLESEFVYGDYKVYDVRKMIAKSEQEIGKATAKYFFYSNIMNFFKTEITLANGEIRKRPLIETNGETGEIVWDKGRDFATVRKVLSMPQVNIVKKTEVQTGGFSKESILPKRNSDKLIARKKDWDPKKYGGFDSPTVAYSVLVVAKVEKGKSKKLKSVKELLGITIMERSSFEKNPIDFLEAKGYKEVKKDLIIKLPKYSLFELENGRKRMLASAGELQKGNELALPSKYVNFLYLASHYEKLKGSPEDNEQKQLFVEQHKHYLDEIIEQISEFSKRVILADANLDKVLSAYNKHRDKPIREQAENIIHLFTLTNLGAPAAFKYFDTTIDRKRYTSTKEVLDATLIHQSITGLYETRIDLSQLGGDGGGSSPAPGGGGGTLNIEDEYRLHETSKGPDVPLGSTWLSDFPQAWAETGGMGLAVRQAPLIIPLKATSTPVSIKQYPMSQEARLGIKPHIQRLLDQGILVPCQSPWNTPLLPVKKPGTNDYRPVQDLREVNKRVEDIHPTVPNPYNLLSGLPPSHQWYTVLDLKDAFFCLRLHPTSQSLFAFEWRDPEMGISGQLTWTRLPQGFKNSPTLFNEALHRDLADFRIQHPDLILLQYVDDLLLAATSELDCQQGTRALLQTLGDLGYRASAKKAQICQKQVKYLGYLLKEGQRWLTEARKETVMGQPTPKTPRQLREFLGTAGFCRLWIPGFAEMAAPLYPLTKPGTLFEWGPDQQKAYQEIKQALLTAPALGLPDLTKPFELFVDEKQGYAKGVLTQKLGPWRRPVAYLSKKLDPVAAGWPPCLRMVAAIAVLTKDAGKLTMGQPLVILAPHAVEALVKQPPDRWLSNARMTHYQALLLDTDRVQFGPIVALNPATLLPLPEEGLQHDCLDILAEAHGTRPDLTDQPLPDADHTWYTDGSSFLQEGQRKAGAAVTTETEVVWAKALPAGTSAQRAELIALTQALKMAEGKKLNVYTDSRYAFATAHIHGEIYRRRGWLTSEGKEIKNKDEILALLKALFLPKRLSIIHCPGHQKGNRAEARGNRMADQAAREVATRETPETSTLLAGKRTADGSEFEKRTADGSEFESPKKKAKVE

SEQ ID NO: 7411 - protein, 2094 aa, synthetic construct
MPAAKRVKLDGGDKKYSIGLDIGTNSVGWAVITDEYKVPSKKFKVLGNTDRHSIKKNLIGALLFDSGETAEATRLKRTARRRYTRRKNRICYLQEIFSNEMAKVDDSFFHRLEESFLVEEDKKHERHPIFGNIVDEVAYHEKYPTIYHLRKKLVDSTDKADLRLIYLALAHMIKFRGHFLIEGDLNPDNSDVDKLFIQLVQTYNQLFEENPINASGVDAKAILSARLSKSRRLENLIAQLPGEKKNGLFGNLIALSLGLTPNFKSNFDLAEDAKLQLSKDTYDDDLDNLLAQIGDQYADLFLAAKNLSDAILLSDILRVNTEITKAPLSASMIKRYDEHHQDLTLLKALVRQQLPEKYKEIFFDQSKNGYAGYIDGGASQEEFYKFIKPILEKMDGTEELLVKLNREDLLRKQRTFDNGSIPHQIHLGELHAILRRQEDFYPFLKDNREKIEKILTFRIPYYVGPLARGNSRFAWMTRKSEETITPWNFEEVVDKGASAQSFIERMTNFDKNLPNEKVLPKHSLLYEYFTVYNELTKVKYVTEGMRKPAFLSGEQKKAIVDLLFKTNRKVTVKQLKEDYFKKIECFDSVEISGVEDRFNASLGTYHDLLKIIKDKDFLDNEENEDILEDIVLTLTLFEDREMIEERLKTYAHLFDDKVMKQLKRRRYTGWGRLSRKLINGIRDKQSGKTILDFLKSDGFANRNFMQLIHDDSLTFKEDIQKAQVSGQGDSLHEHIANLAGSPAIKKGILQTVKVVDELVKVMGRHKPENIVIEMARENQTTQKGQKNSRERMKRIEEGIKELGSQILKEHPVENTQLQNEKLYLYYLQNGRDMYVDQELDINRLSDYDVDHIVPQSFLKDDSIDNKVLTRSDKARGKSDNVPSEEVVKKMKNYWRQLLNAKLITQRKFDNLTKAERGGLSELDKAGFIKRQLVETRQITKHVAQILDSRMNTKYDENDKLIREVKVITLKSKLVSDFRKDFQFYKVREINNYHHAHDAYLNAVVGTALIKKYPKLESEFVYGDYKVYDVRKMIAKSEQEIGKATAKYFFYSNIMNFFKTEITLANGEIRKRPLIETNGETGEIVWDKGRDFATVRKVLSMPQVNIVKKTEVQTGGFSKESILPKRNSDKLIARKKDWDPKKYGGFDSPTVAYSVLVVAKVEKGKSKKLKSVKELLGITIMERSSFEKNPIDFLEAKGYKEVKKDLIIKLPKYSLFELENGRKRMLASAGELQKGNELALPSKYVNFLYLASHYEKLKGSPEDNEQKQLFVEQHKHYLDEIIEQISEFSKRVILADANLDKVLSAYNKHRDKPIREQAENIIHLFTLTNLGAPAAFKYFDTTIDRKRYTSTKEVLDATLIHQSITGLYETRIDLSQLGGDGGGSSPAPGGGGGTLNIEDEHRLHETSKEPDVSLGSTWLSDFPQAWAETGGMGLAVRQAPLIIPLKATSTPVSIKQYPMSQEARLGIKPHIQRLLDQGILVPCQSPWNTPLLPVKKPGTNDYRPVQDLREVNKRVEDIHPTVPNPYNLLSGLPPSHQWYTVLDLKDAFFCLRLHPTSQPLFAFEWRDPEMGISGQLTWTRLPQGFKNSPTLFDEALHRDLADFRIQHPDLILLQYVDDLLLAATSELDCQQGTRALLQTLGNLGYRASAKKAQICQKQVKYLGYLLKEGQRWLTEARKETVMGQPTPKTPRQLREFLGTAGFCRLWIPGFAEMAAPLYPLTKTGTLFNWGPDQQKAYQEIKQALLTAPALGLPDLTKPFELFVDEKQGYAKGVLTQKLGPWRRPVAYLSKKLDPVAAGWPPCLRMVAAIAVLTKDAGKLTMGQPLVILAPHAVEALVKQPPDRWLSNARMTHYQALLLDTDRVQFGPVVALNPATLLPLPEEGLQHNCLDILAEAHGTRPDLTDQPLPDADHTWYTDGSSLLQEGQRKAGAAVTTETEVIWAKALPAGTSAQRAELIALTQALKMAEGKKLNVYTDSRYAFATAHIHGEIYRRRGLLTSEGKEIKNKDEILALLKALFLPKRLSIIHCPGHQKGHSAEARGNRMADQAARKAAITETPDTSTLLAGKRTADGSEFEKRTADGSEFESPKKKAKVE

SEQ ID NO: 7412 - protein, 2100 aa, synthetic construct
MPAAKRVKLDGGDKKYSIGLDIGTNSVGWAVITDEYKVPSKKFKVLGNTDRHSIKKNLIGALLFDSGETAEATRLKRTARRRYTRRKNRICYLQEIFSNEMAKVDDSFFHRLEESFLVEEDKKHERHPIFGNIVDEVAYHEKYPTIYHLRKKLVDSTDKADLRLIYLALAHMIKFRGHFLIEGDLNPDNSDVDKLFIQLVQTYNQLFEENPINASGVDAKAILSARLSKSRRLENLIAQLPGEKKNGLFGNLIALSLGLTPNFKSNFDLAEDAKLQLSKDTYDDDLDNLLAQIGDQYADLFLAAKNLSDAILLSDILRVNTEITKAPLSASMIKRYDEHHQDLTLLKALVRQQLPEKYKEIFFDQSKNGYAGYIDGGASQEEFYKFIKPILEKMDGTEELLVKLNREDLLRKQRTFDNGSIPHQIHLGELHAILRRQEDFYPFLKDNREKIEKILTFRIPYYVGPLARGNSRFAWMTRKSEETITPWNFEEVVDKGASAQSFIERMTNFDKNLPNEKVLPKHSLLYEYFTVYNELTKVKYVTEGMRKPAFLSGEQKKAIVDLLFKTNRKVTVKQLKEDYFKKIECFDSVEISGVEDRFNASLGTYHDLLKIIKDKDFLDNEENEDILEDIVLTLTLFEDREMIEERLKTYAHLFDDKVMKQLKRRRYTGWGRLSRKLINGIRDKQSGKTILDFLKSDGFANRNFMQLIHDDSLTFKEDIQKAQVSGQGDSLHEHIANLAGSPAIKKGILQTVKVVDELVKVMGRHKPENIVIEMARENQTTQKGQKNSRERMKRIEEGIKELGSQILKEHPVENTQLQNEKLYLYYLQNGRDMYVDQELDINRLSDYDVDHIVPQSFLKDDSIDNKVLTRSDKARGKSDNVPSEEVVKKMKNYWRQLLNAKLITQRKFDNLTKAERGGLSELDKAGFIKRQLVETRQITKHVAQILDSRMNTKYDENDKLIREVKVITLKSKLVSDFRKDFQFYKVREINNYHHAHDAYLNAVVGTALIKKYPKLESEFVYGDYKVYDVRKMIAKSEQEIGKATAKYFFYSNIMNFFKTEITLANGEIRKRPLIETNGETGEIVWDKGRDFATVRKVLSMPQVNIVKKTEVQTGGFSKESILPKRNSDKLIARKKDWDPKKYGGFDSPTVAYSVLVVAKVEKGKSKKLKSVKELLGITIMERSSFEKNPIDFLEAKGYKEVKKDLIIKLPKYSLFELENGRKRMLASAGELQKGNELALPSKYVNFLYLASHYEKLKGSPEDNEQKQLFVEQHKHYLDEIIEQISEFSKRVILADANLDKVLSAYNKHRDKPIREQAENIIHLFTLTNLGAPAAFKYFDTTIDRKRYTSTKEVLDATLIHQSITGLYETRIDLSQLGGDGGPAPGGGGSSGGTVSLQDEHRLFDIPVTTSLPDVWLQDFPQAWAETGGLGRAKCQAPIIIDLKPTAVPVSIKQYPMSLEAHMGIRQHIIKFLELGVLRPCRSPWNTPLLPVKKPGTQDYRPVQDLREINKRTVDIHPTVPNPYNLLSTLKPDYSWYTVLDLKDAFFCLPLAPQSQELFAFEWKDPERGISGQLTWTRLPQGFKNSPTLFNEALHRDLTDFRTQHPEVTLLQYVDDLLLAAPTKKACTQGTRHLLQELGEKGYRASAKKAQICQTKVTYLGYILSEGKRWLTPGRIETVARIPPPRNPREVREFLGTAGFCRLWIPGFAELAAPLYALTKPSTPFTWQTEHQLAFEALKKALLSAPALGLPDTSKPFTLFLDERQGIAKGVLTQKLGPWKRPVAYLSKKLDPVAAGWPPCLRIMAATAMLVKDSAKLTLGQPLTVITPHTLEAIVRQPPDRWITNARLTHYQALLLDTDRVQFGPPVTLNPATLLPVPENQPSPHDCRQVLAETHGTREDLKDQELPDADHTWYTDGSSYLDSGTRRAGAAVVDGHNTIWAQSLPPGTSAQKAELIALTKALELSKGKKANIYTDSRYAFATAHTHGSIYERRGWLTSEGKEIKNKAEIIALLKALFLPQEVAIIHCPGHQKGQDPVAVGNRQADRVARQAAMAEVLTLATEPDNTSHITAGKRTADGSEFEKRTADGSEFESPKKKAKVE

SEQ ID NO: 7413 - protein, 1999 aa, synthetic construct
MPAAKRVKLDGGDKKYSIGLDIGTNSVGWAVITDEYKVPSKKFKVLGNTDRHSIKKNLIGALLFDSGETAEATRLKRTARRRYTRRKNRICYLQEIFSNEMAKVDDSFFHRLEESFLVEEDKKHERHPIFGNIVDEVAYHEKYPTIYHLRKKLVDSTDKADLRLIYLALAHMIKFRGHFLIEGDLNPDNSDVDKLFIQLVQTYNQLFEENPINASGVDAKAILSARLSKSRRLENLIAQLPGEKKNGLFGNLIALSLGLTPNFKSNFDLAEDAKLQLSKDTYDDDLDNLLAQIGDQYADLFLAAKNLSDAILLSDILRVNTEITKAPLSASMIKRYDEHHQDLTLLKALVRQQLPEKYKEIFFDQSKNGYAGYIDGGASQEEFYKFIKPILEKMDGTEELLVKLNREDLLRKQRTFDNGSIPHQIHLGELHAILRRQEDFYPFLKDNREKIEKILTFRIPYYVGPLARGNSRFAWMTRKSEETITPWNFEEVVDKGASAQSFIERMTNFDKNLPNEKVLPKHSLLYEYFTVYNELTKVKYVTEGMRKPAFLSGEQKKAIVDLLFKTNRKVTVKQLKEDYFKKIECFDSVEISGVEDRFNASLGTYHDLLKIIKDKDFLDNEENEDILEDIVLTLTLFEDREMIEERLKTYAHLFDDKVMKQLKRRRYTGWGRLSRKLINGIRDKQSGKTILDFLKSDGFANRNFMQLIHDDSLTFKEDIQKAQVSGQGDSLHEHIANLAGSPAIKKGILQTVKVVDELVKVMGRHKPENIVIEMARENQTTQKGQKNSRERMKRIEEGIKELGSQILKEHPVENTQLQNEKLYLYYLQNGRDMYVDQELDINRLSDYDVDHIVPQSFLKDDSIDNKVLTRSDKARGKSDNVPSEEVVKKMKNYWRQLLNAKLITQRKFDNLTKAERGGLSELDKAGFIKRQLVETRQITKHVAQILDSRMNTKYDENDKLIREVKVITLKSKLVSDFRKDFQFYKVREINNYHHAHDAYLNAVVGTALIKKYPKLESEFVYGDYKVYDVRKMIAKSEQEIGKATAKYFFYSNIMNFFKTEITLANGEIRKRPLIETNGETGEIVWDKGRDFATVRKVLSMPQVNIVKKTEVQTGGFSKESILPKRNSDKLIARKKDWDPKKYGGFDSPTVAYSVLVVAKVEKGKSKKLKSVKELLGITIMERSSFEKNPIDFLEAKGYKEVKKDLIIKLPKYSLFELENGRKRMLASAGELQKGNELALPSKYVNFLYLASHYEKLKGSPEDNEQKQLFVEQHKHYLDEIIEQISEFSKRVILADANLDKVLSAYNKHRDKPIREQAENIIHLFTLTNLGAPAAFKYFDTTIDRKRYTSTKEVLDATLIHQSITGLYETRIDLSQLGGDGGPAPGGGGSSGGGVLDTPPSHIGLEHLPPPPEVPQFPLNLERLQALQDLVHRSLEAGYISPWDGPGNNPVFPVRKPNGAWRFVHDLRATNALTKPIPALSPGPPDLTAPPTHPPHIICLDLKDAFFQIPVEDRFRFYLSFTLPSPGGLQPHRRFAWRVLPQGFINSPALFQRALQEPLRQVSAAFSQSLLVSYMDDILYASPTEEQRSQCYQALAARLRDLGFQVASEKTSQTPSPVPFLGQMVHEQIVTYQSLPTLQISSPISLHQLQAVLGDLQWVSRGTPTTRRPLQLLYSSLKRHHDPRAIIQLSPEQLQGIAELRQALSHNARSRYNEQEPLLAYVHLTRAGSTLVLFQKGAQFPLAYFQTPLTDNQASPWGLLLLLGCQYLQTQALSSYAKPILKYYHNLPKTSLDNWIQSSEDPRVQELLQLWPQISSQGIQPPGPWKTLITRAEVFLTPQFSPDPIPAALCLFSDGATGRGAYCLWKDHLLDFQAVPAPESAQKGELAGLLAGLAAAPPEPVNIWVDSKYLYSLLRTWVLGAWLQPDPVPSYALLYKSLLRHPAIVVGHVRSHSSASHPIASLNNYVDQLAGKRTADGSEFEKRTADGSEFESPKKKAKVE

SEQ ID NO: 7414 - protein, 2171 aa, synthetic construct
MPAAKRVKLDGGDKKYSIGLDIGTNSVGWAVITDEYKVPSKKFKVLGNTDRHSIKKNLIGALLFDSGETAEATRLKRTARRRYTRRKNRICYLQEIFSNEMAKVDDSFFHRLEESFLVEEDKKHERHPIFGNIVDEVAYHEKYPTIYHLRKKLVDSTDKADLRLIYLALAHMIKFRGHFLIEGDLNPDNSDVDKLFIQLVQTYNQLFEENPINASGVDAKAILSARLSKSRRLENLIAQLPGEKKNGLFGNLIALSLGLTPNFKSNFDLAEDAKLQLSKDTYDDDLDNLLAQIGDQYADLFLAAKNLSDAILLSDILRVNTEITKAPLSASMIKRYDEHHQDLTLLKALVRQQLPEKYKEIFFDQSKNGYAGYIDGGASQEEFYKFIKPILEKMDGTEELLVKLNREDLLRKQRTFDNGSIPHQIHLGELHAILRRQEDFYPFLKDNREKIEKILTFRIPYYVGPLARGNSRFAWMTRKSEETITPWNFEEVVDKGASAQSFIERMTNFDKNLPNEKVLPKHSLLYEYFTVYNELTKVKYVTEGMRKPAFLSGEQKKAIVDLLFKTNRKVTVKQLKEDYFKKIECFDSVEISGVEDRFNASLGTYHDLLKIIKDKDFLDNEENEDILEDIVLTLTLFEDREMIEERLKTYAHLFDDKVMKQLKRRRYTGWGRLSRKLINGIRDKQSGKTILDFLKSDGFANRNFMQLIHDDSLTFKEDIQKAQVSGQGDSLHEHIANLAGSPAIKKGILQTVKVVDELVKVMGRHKPENIVIEMARENQTTQKGQKNSRERMKRIEEGIKELGSQILKEHPVENTQLQNEKLYLYYLQNGRDMYVDQELDINRLSDYDVDHIVPQSFLKDDSIDNKVLTRSDKARGKSDNVPSEEVVKKMKNYWRQLLNAKLITQRKFDNLTKAERGGLSELDKAGFIKRQLVETRQITKHVAQILDSRMNTKYDENDKLIREVKVITLKSKLVSDFRKDFQFYKVREINNYHHAHDAYLNAVVGTALIKKYPKLESEFVYGDYKVYDVRKMIAKSEQEIGKATAKYFFYSNIMNFFKTEITLANGEIRKRPLIETNGETGEIVWDKGRDFATVRKVLSMPQVNIVKKTEVQTGGFSKESILPKRNSDKLIARKKDWDPKKYGGFDSPTVAYSVLVVAKVEKGKSKKLKSVKELLGITIMERSSFEKNPIDFLEAKGYKEVKKDLIIKLPKYSLFELENGRKRMLASAGELQKGNELALPSKYVNFLYLASHYEKLKGSPEDNEQKQLFVEQHKHYLDEIIEQISEFSKRVILADANLDKVLSAYNKHRDKPIREQAENIIHLFTLTNLGAPAAFKYFDTTIDRKRYTSTKEVLDATLIHQSITGLYETRIDLSQLGGDGGPAPGGGGSSGGMDLLKPLTVERKGVKIKGYWNSQADITCVPKDLLQGEEPVRQQNVTTIHGTQEGDVYYVNLKIDGRRINTEVIGTTLDYAIITPGDVPWILKKPLELTIKLDLEEQQGTLLNNSILSKKGKEELKQLFEKYSALWQSWENQVGHRRIRPHKIATGTVKPTPQKQYHINPKAKPDIQIVINDLLKQGVLIQKESTMNTPVYPVPKPNGRWRMVLDYRAVNKVTPLIAVQNQHSYGILGSLFKGRYKTTIDLSNGFWAHPIVPEDYWITAFTWQGKQYCWTVLPQGFLNSPGLFTGDVVDLLQGIPNVEVYVDDVYISHDSEKEHLEYLDILFNRLKEAGYIISLKKSNIANSIVDFLGFQITNEGRGLTDTFKEKLENITAPTTLKQLQSILGLLNFARNFIPDFTELIAPLYALIPKSTKNYVPWQIEHSTTLETLITKLNGAEYLQGRKGDKTLIMKVNASYTTGYIRYYNEGEKKPISYVSIVFSKTELKFTELEKLLTTVHKGLLKALDLSMGQNIHVYSPIVSMQNIQKTPQTAKKALASRWLSWLSYLEDPRIRFFYDPQMPALKDLPAVDTGKDNKKHPSNFQHIFYTDGSAITSPTKEGHLNAGMGIVYFINKDGNLQKQQEWSISLGNHTAQFAEIAAFEFALKKCLPLGGNILVVTDSNYVAKAYNEELDVWASNGFVNNRKKPLKHISKWKSVADLKRLRPDVVVTHEPGHQKLDSSPHAYGNNLADQLATQASFKVHAGKRTADGSEFEKRTADGSEFESPKKKAKVE

SEQ ID NO: 7415 - protein, 2093 aa, synthetic construct
MPAAKRVKLDGGDKKYSIGLDIGTNSVGWAVITDEYKVPSKKFKVLGNTDRHSIKKNLIGALLFDSGETAEATRLKRTARRRYTRRKNRICYLQEIFSNEMAKVDDSFFHRLEESFLVEEDKKHERHPIFGNIVDEVAYHEKYPTIYHLRKKLVDSTDKADLRLIYLALAHMIKFRGHFLIEGDLNPDNSDVDKLFIQLVQTYNQLFEENPINASGVDAKAILSARLSKSRRLENLIAQLPGEKKNGLFGNLIALSLGLTPNFKSNFDLAEDAKLQLSKDTYDDDLDNLLAQIGDQYADLFLAAKNLSDAILLSDILRVNTEITKAPLSASMIKRYDEHHQDLTLLKALVRQQLPEKYKEIFFDQSKNGYAGYIDGGASQEEFYKFIKPILEKMDGTEELLVKLNREDLLRKQRTFDNGSIPHQIHLGELHAILRRQEDFYPFLKDNREKIEKILTFRIPYYVGPLARGNSRFAWMTRKSEETITPWNFEEVVDKGASAQSFIERMTNFDKNLPNEKVLPKHSLLYEYFTVYNELTKVKYVTEGMRKPAFLSGEQKKAIVDLLFKTNRKVTVKQLKEDYFKKIECFDSVEISGVEDRFNASLGTYHDLLKIIKDKDFLDNEENEDILEDIVLTLTLFEDREMIEERLKTYAHLFDDKVMKQLKRRRYTGWGRLSRKLINGIRDKQSGKTILDFLKSDGFANRNFMQLIHDDSLTFKEDIQKAQVSGQGDSLHEHIANLAGSPAIKKGILQTVKVVDELVKVMGRHKPENIVIEMARENQTTQKGQKNSRERMKRIEEGIKELGSQILKEHPVENTQLQNEKLYLYYLQNGRDMYVDQELDINRLSDYDVDHIVPQSFLKDDSIDNKVLTRSDKARGKSDNVPSEEVVKKMKNYWRQLLNAKLITQRKFDNLTKAERGGLSELDKAGFIKRQLVETRQITKHVAQILDSRMNTKYDENDKLIREVKVITLKSKLVSDFRKDFQFYKVREINNYHHAHDAYLNAVVGTALIKKYPKLESEFVYGDYKVYDVRKMIAKSEQEIGKATAKYFFYSNIMNFFKTEITLANGEIRKRPLIETNGETGEIVWDKGRDFATVRKVLSMPQVNIVKKTEVQTGGFSKESILPKRNSDKLIARKKDWDPKKYGGFDSPTVAYSVLVVAKVEKGKSKKLKSVKELLGITIMERSSFEKNPIDFLEAKGYKEVKKDLIIKLPKYSLFELENGRKRMLASAGELQKGNELALPSKYVNFLYLASHYEKLKGSPEDNEQKQLFVEQHKHYLDEIIEQISEFSKRVILADANLDKVLSAYNKHRDKPIREQAENIIHLFTLTNLGAPAAFKYFDTTIDRKRYTSTKEVLDATLIHQSITGLYETRIDLSQLGGDGGPAPGGGGSSGGTLQLEEEYRLFEPESTQKQEMDIWLKNFPQAWAETGGMGTAHCQAPVLIQLKATATPISIRQYPMPHEAYQGIKPHIRRMLDQGILKPCQSPWNTPLLPVKKPGTEDYRPVQDLREVNKRVEDIHPTVPNPYNLLSTLPPSHPWYTVLDLKDAFFCLRLHSESQLLFAFEWRDPEIGLSGQLTWTRLPQGFKNSPTLFNEALHSDLADFRVRYPALVLLQYVDDLLLAAATRTECLEGTKALLETLGNKGYRASAKKAQICLQEVTYLGYSLKDGQRWLTKARKEAILSIPVPKNSRQVREFLGTAGYCRLWIPGFAELAAPLYPLTRPGTLFQWGTEQQLAFEDIKKALLSSPALGLPDITKPFELFIDENSGFAKGVLVQKLGPWKRPVAYLSKKLDTVASGWPPCLRMVAAIAILVKDAGKLTLGQPLTILTSHPVEALVRQPPNKWLSNARMTHYQAMLLDAERVHFGPTVSLNPATLLPLPSGGNHHDCLQILAETHGTRPDLTDQPLPDADLTWYTDGSSFIRNGEREAGAAVTTESEVIWAAPLPPGTSAQRAELIALTQALKMAEGKKLTVYTDSRYAFATTHVHGEIYRRRGWLTSEGKEIKNKNEILALLEALFLPKRLSIIHCPGHQKGDSPQAKGNRLADDTAKKAATETHSSLTVLPAGKRTADGSEFEKRTADGSEFESPKKKAKVE

SEQ ID NO: 7416 - protein, 2216 aa, synthetic construct
MPAAKRVKLDGGDKKYSIGLDIGTNSVGWAVITDEYKVPSKKFKVLGNTDRHSIKKNLIGALLFDSGETAEATRLKRTARRRYTRRKNRICYLQEIFSNEMAKVDDSFFHRLEESFLVEEDKKHERHPIFGNIVDEVAYHEKYPTIYHLRKKLVDSTDKADLRLIYLALAHMIKFRGHFLIEGDLNPDNSDVDKLFIQLVQTYNQLFEENPINASGVDAKAILSARLSKSRRLENLIAQLPGEKKNGLFGNLIALSLGLTPNFKSNFDLAEDAKLQLSKDTYDDDLDNLLAQIGDQYADLFLAAKNLSDAILLSDILRVNTEITKAPLSASMIKRYDEHHQDLTLLKALVRQQLPEKYKEIFFDQSKNGYAGYIDGGASQEEFYKFIKPILEKMDGTEELLVKLNREDLLRKQRTFDNGSIPHQIHLGELHAILRRQEDFYPFLKDNREKIEKILTFRIPYYVGPLARGNSRFAWMTRKSEETITPWNFEEVVDKGASAQSFIERMTNFDKNLPNEKVLPKHSLLYEYFTVYNELTKVKYVTEGMRKPAFLSGEQKKAIVDLLFKTNRKVTVKQLKEDYFKKIECFDSVEISGVEDRFNASLGTYHDLLKIIKDKDFLDNEENEDILEDIVLTLTLFEDREMIEERLKTYAHLFDDKVMKQLKRRRYTGWGRLSRKLINGIRDKQSGKTILDFLKSDGFANRNFMQLIHDDSLTFKEDIQKAQVSGQGDSLHEHIANLAGSPAIKKGILQTVKVVDELVKVMGRHKPENIVIEMARENQTTQKGQKNSRERMKRIEEGIKELGSQILKEHPVENTQLQNEKLYLYYLQNGRDMYVDQELDINRLSDYDVDHIVPQSFLKDDSIDNKVLTRSDKARGKSDNVPSEEVVKKMKNYWRQLLNAKLITQRKFDNLTKAERGGLSELDKAGFIKRQLVETRQITKHVAQILDSRMNTKYDENDKLIREVKVITLKSKLVSDFRKDFQFYKVREINNYHHAHDAYLNAVVGTALIKKYPKLESEFVYGDYKVYDVRKMIAKSEQEIGKATAKYFFYSNIMNFFKTEITLANGEIRKRPLIETNGETGEIVWDKGRDFATVRKVLSMPQVNIVKKTEVQTGGFSKESILPKRNSDKLIARKKDWDPKKYGGFDSPTVAYSVLVVAKVEKGKSKKLKSVKELLGITIMERSSFEKNPIDFLEAKGYKEVKKDLIIKLPKYSLFELENGRKRMLASAGELQKGNELALPSKYVNFLYLASHYEKLKGSPEDNEQKQLFVEQHKHYLDEIIEQISEFSKRVILADANLDKVLSAYNKHRDKPIREQAENIIHLFTLTNLGAPAAFKYFDTTIDRKRYTSTKEVLDATLIHQSITGLYETRIDLSQLGGDGGPAPGGGGSSGGTLGDQGSRGSDPLPEPRVTLTVEGIPTEFLVNTGAEHSVLTKPMGKMGSKRTVVAGATGSKVYPWTTKRLLKIGQKQVTHSFLVIPECPAPLLGRDLLTKLKAQIQFSTEGPQVTWEDRPAMCLVLNLEEEYRLHEKPVPPSIDPSWLQLFPMVWAEKAGMGLANQVPPVVVELKSDASPVAVRQYPMSKEAREGIRPHIQRFLDLGILVPCQSPWNTPLLPVKKPGTNDYRPVQDLREVNKRVQDIHPTVPNPYNLLSSLPPSHTWYSVLDLKDAFFCLKLHPNSQPLFAFEWRDPEKGNTGQLTWTRLPQGFKNSPTLFDEALHRDLASFRALNPQVVMLQYVDDLLVAAPTYRDCKEGTRRLLQELSKLGYRVSAKKAQLCREEVTYLGYLLKGGKRWLTPARKATVMKIPTPTTPRQVREFLGTAGFCRLWIPGFASLAAPLYPLTREKVPFTWTEAHQEAFGRIKEALLSAPALALPDLTKPFALYVDEKEGVARGVLTQTLGPWRRPVAYLSKKLDPVASGWPTCLKAIAAVALLLKDADKLTLGQNVLVIAPHNLESIVRQPPDRWMTNARMTHYQSLLLNERVSFAPPAILNPATLLPVESDDTPIHICSEILAEETGTRPDLRDQPLPGVPAWYTDGSSFIMDGRRQAGAAIVDNKRTVWASNLPEGTSAQKAELIALTQALRLAEGKSINIYTDSRYAFATAHVHGAIYKQRGLLTSAGKDIKNKEEILALLEAIHLPKRVAIIHCPGHQRGTDPVATGNRKADEAAKQAAQSTRILTETTKNAGKRTADGSEFEKRTADGSEFESPKKKAKVE

SEQ ID NO: 7417 - protein, 2125 aa, synthetic construct
MPAAKRVKLDGGDKKYSIGLDIGTNSVGWAVITDEYKVPSKKFKVLGNTDRHSIKKNLIGALLFDSGETAEATRLKRTARRRYTRRKNRICYLQEIFSNEMAKVDDSFFHRLEESFLVEEDKKHERHPIFGNIVDEVAYHEKYPTIYHLRKKLVDSTDKADLRLIYLALAHMIKFRGHFLIEGDLNPDNSDVDKLFIQLVQTYNQLFEENPINASGVDAKAILSARLSKSRRLENLIAQLPGEKKNGLFGNLIALSLGLTPNFKSNFDLAEDAKLQLSKDTYDDDLDNLLAQIGDQYADLFLAAKNLSDAILLSDILRVNTEITKAPLSASMIKRYDEHHQDLTLLKALVRQQLPEKYKEIFFDQSKNGYAGYIDGGASQEEFYKFIKPILEKMDGTEELLVKLNREDLLRKQRTFDNGSIPHQIHLGELHAILRRQEDFYPFLKDNREKIEKILTFRIPYYVGPLARGNSRFAWMTRKSEETITPWNFEEVVDKGASAQSFIERMTNFDKNLPNEKVLPKHSLLYEYFTVYNELTKVKYVTEGMRKPAFLSGEQKKAIVDLLFKTNRKVTVKQLKEDYFKKIECFDSVEISGVEDRFNASLGTYHDLLKIIKDKDFLDNEENEDILEDIVLTLTLFEDREMIEERLKTYAHLFDDKVMKQLKRRRYTGWGRLSRKLINGIRDKQSGKTILDFLKSDGFANRNFMQLIHDDSLTFKEDIQKAQVSGQGDSLHEHIANLAGSPAIKKGILQTVKVVDELVKVMGRHKPENIVIEMARENQTTQKGQKNSRERMKRIEEGIKELGSQILKEHPVENTQLQNEKLYLYYLQNGRDMYVDQELDINRLSDYDVDHIVPQSFLKDDSIDNKVLTRSDKARGKSDNVPSEEVVKKMKNYWRQLLNAKLITQRKFDNLTKAERGGLSELDKAGFIKRQLVETRQITKHVAQILDSRMNTKYDENDKLIREVKVITLKSKLVSDFRKDFQFYKVREINNYHHAHDAYLNAVVGTALIKKYPKLESEFVYGDYKVYDVRKMIAKSEQEIGKATAKYFFYSNIMNFFKTEITLANGEIRKRPLIETNGETGEIVWDKGRDFATVRKVLSMPQVNIVKKTEVQTGGFSKESILPKRNSDKLIARKKDWDPKKYGGFDSPTVAYSVLVVAKVEKGKSKKLKSVKELLGITIMERSSFEKNPIDFLEAKGYKEVKKDLIIKLPKYSLFELENGRKRMLASAGELQKGNELALPSKYVNFLYLASHYEKLKGSPEDNEQKQLFVEQHKHYLDEIIEQISEFSKRVILADANLDKVLSAYNKHRDKPIREQAENIIHLFTLTNLGAPAAFKYFDTTIDRKRYTSTKEVLDATLIHQSITGLYETRIDLSQLGGDGGPAPGGGGSSGGLLGRDLLTKLKAQIQFSTEGPQVTWEDRPAMCLVLNLEEEYRLHEKPVPPSIDPSWLQLFPMVWAEKAGMGLANQVPPVVVELKSDASPVAVRQYPMSKEAREGIRPHIQRFLDLGILVPCQSPWNTPLLPVKKPGTNDYRPVQDLREVNKRVQDIHPTVPNPYNLLSSLPPSHTWYSVLDLKDAFFCLKLHPNSQPLFAFEWRDPEKGNTGQLTWTRLPQGFKNSPTLFNEALHRDLASFRALNPQVVMLQYVDDLLVAAPTYRDCKEGTRRLLQELSKLGYRVSAKKAQLCREEVTYLGYLLKGGKRWLTPARKATVMKIPTPTTPRQVREFLGTAGFCRLWIPGFASLAAPLYPLTRPKVPFTWTEAHQEAFGRIKEALLSAPALALPDLTKPFALYVDEKEGVARGVLTQTLGPWRRPVAYLSKKLDPVASGWPTCLKAIAAVALLLKDADKLTLGQNVLVIAPHNLESIVRQPPDRWMTNARMTHYQSLLLNERVSFAPPAILNPATLLPVESDDTPIHICSEILAEETGTRPDLRDQPLPGVPAWYTDGSSFIMDGRRQAGAAIVDNKRTVWASNLPEGTSAQKAELIALTQALRLAEGKSINIYTDSRYAFATAHVHGAIYKQRGWLTSAGKDIKNKEEILALLEAIHLPKRVAIIHCPGHQRGTDPVATGNRKADEAAKQAAQSTRILTETTKNAGKRTADGSEFEKRTADGSEFESPKKKAKVE

SEQ ID NO: 7418 - protein, 2216 aa, synthetic construct
MPAAKRVKLDGGDKKYSIGLDIGTNSVGWAVITDEYKVPSKKFKVLGNTDRHSIKKNLIGALLFDSGETAEATRLKRTARRRYTRRKNRICYLQEIFSNEMAKVDDSFFHRLEESFLVEEDKKHERHPIFGNIVDEVAYHEKYPTIYHLRKKLVDSTDKADLRLIYLALAHMIKFRGHFLIEGDLNPDNSDVDKLFIQLVQTYNQLFEENPINASGVDAKAILSARLSKSRRLENLIAQLPGEKKNGLFGNLIALSLGLTPNFKSNFDLAEDAKLQLSKDTYDDDLDNLLAQIGDQYADLFLAAKNLSDAILLSDILRVNTEITKAPLSASMIKRYDEHHQDLTLLKALVRQQLPEKYKEIFFDQSKNGYAGYIDGGASQEEFYKFIKPILEKMDGTEELLVKLNREDLLRKQRTFDNGSIPHQIHLGELHAILRRQEDFYPFLKDNREKIEKILTFRIPYYVGPLARGNSRFAWMTRKSEETITPWNFEEVVDKGASAQSFIERMTNFDKNLPNEKVLPKHSLLYEYFTVYNELTKVKYVTEGMRKPAFLSGEQKKAIVDLLFKTNRKVTVKQLKEDYFKKIECFDSVEISGVEDRFNASLGTYHDLLKIIKDKDFLDNEENEDILEDIVLTLTLFEDREMIEERLKTYAHLFDDKVMKQLKRRRYTGWGRLSRKLINGIRDKQSGKTILDFLKSDGFANRNFMQLIHDDSLTFKEDIQKAQVSGQGDSLHEHIANLAGSPAIKKGILQTVKVVDELVKVMGRHKPENIVIEMARENQTTQKGQKNSRERMKRIEEGIKELGSQILKEHPVENTQLQNEKLYLYYLQNGRDMYVDQELDINRLSDYDVDHIVPQSFLKDDSIDNKVLTRSDKARGKSDNVPSEEVVKKMKNYWRQLLNAKLITQRKFDNLTKAERGGLSELDKAGFIKRQLVETRQITKHVAQILDSRMNTKYDENDKLIREVKVITLKSKLVSDFRKDFQFYKVREINNYHHAHDAYLNAVVGTALIKKYPKLESEFVYGDYKVYDVRKMIAKSEQEIGKATAKYFFYSNIMNFFKTEITLANGEIRKRPLIETNGETGEIVWDKGRDFATVRKVLSMPQVNIVKKTEVQTGGFSKESILPKRNSDKLIARKKDWDPKKYGGFDSPTVAYSVLVVAKVEKGKSKKLKSVKELLGITIMERSSFEKNPIDFLEAKGYKEVKKDLIIKLPKYSLFELENGRKRMLASAGELQKGNELALPSKYVNFLYLASHYEKLKGSPEDNEQKQLFVEQHKHYLDEIIEQISEFSKRVILADANLDKVLSAYNKHRDKPIREQAENIIHLFTLTNLGAPAAFKYFDTTIDRKRYTSTKEVLDATLIHQSITGLYETRIDLSQLGGDGGPAPGGGGSSGGTLGDQGSRGSDPLPEPRVTLTVEGIPTEFLVNTGAEHSVLTKPMGKMGSKRTVVAGATGSKVYPWTTKRLLKIGQKQVTHSFLVIPECPAPLLGRDLLTKLKAQIQFSTEGPQVTWEDRPAMCLVLNLEEEYRLHEKPVPPSIDPSWLQLFPMVWAEKAGMGLANQVPPVVVELKSDASPVAVRQYPMSKEAREGIRPHIQRFLDLGILVPCQSPWNTPLLPVKKPGTNDYRPVQDLREVNKRVQDIHPTVPNPYNLLSSLPPSHTWYSVLDLKDAFFCLKLHPNSQPLFAFEWRDPEKGNTGQLTWTRLPQGFKNSPTLFNEALHRDLASFRALNPQVVMLQYVDDLLVAAPTYRDCKEGTRRLLQELSKLGYRVSAKKAQLCREEVTYLGYLLKGGKRWLTPARKATVMKIPTPTTPRQVREFLGTAGFCRLWIPGFASLAAPLYPLTRPKVPFTWTEAHQEAFGRIKEALLSAPALALPDLTKPFALYVDEKEGVARGVLTQTLGPWRRPVAYLSKKLDPVASGWPTCLKAIAAVALLLKDADKLTLGQNVLVIAPHNLESIVRQPPDRWMTNARMTHYQSLLLNERVSFAPPAILNPATLLPVESDDTPIHICSEILAEETGTRPDLRDQPLPGVPAWYTDGSSFIMDGRRQAGAAIVDNKRTVWASNLPEGTSAQKAELIALTQALRLAEGKSINIYTDSRYAFATAHVHGAIYKQRGWLTSAGKDIKNKEEILALLEAIHLPKRVAIIHCPGHQRGTDPVATGNRKADEAAKQAAQSTRILTETTKNAGKRTADGSEFEKRTADGSEFESPKKKAKVE

SEQ ID NO: 7419 - protein, 2094 aa, synthetic construct
MPAAKRVKLDGGDKKYSIGLDIGTNSVGWAVITDEYKVPSKKFKVLGNTDRHSIKKNLIGALLFDSGETAEATRLKRTARRRYTRRKNRICYLQEIFSNEMAKVDDSFFHRLEESFLVEEDKKHERHPIFGNIVDEVAYHEKYPTIYHLRKKLVDSTDKADLRLIYLALAHMIKFRGHFLIEGDLNPDNSDVDKLFIQLVQTYNQLFEENPINASGVDAKAILSARLSKSRRLENLIAQLPGEKKNGLFGNLIALSLGLTPNFKSNFDLAEDAKLQLSKDTYDDDLDNLLAQIGDQYADLFLAAKNLSDAILLSDILRVNTEITKAPLSASMIKRYDEHHQDLTLLKALVRQQLPEKYKEIFFDQSKNGYAGYIDGGASQEEFYKFIKPILEKMDGTEELLVKLNREDLLRKQRTFDNGSIPHQIHLGELHAILRRQEDFYPFLKDNREKIEKILTFRIPYYVGPLARGNSRFAWMTRKSEETITPWNFEEVVDKGASAQSFIERMTNFDKNLPNEKVLPKHSLLYEYFTVYNELTKVKYVTEGMRKPAFLSGEQKKAIVDLLFKTNRKVTVKQLKEDYFKKIECFDSVEISGVEDRFNASLGTYHDLLKIIKDKDFLDNEENEDILEDIVLTLTLFEDREMIEERLKTYAHLFDDKVMKQLKRRRYTGWGRLSRKLINGIRDKQSGKTILDFLKSDGFANRNFMQLIHDDSLTFKEDIQKAQVSGQGDSLHEHIANLAGSPAIKKGILQTVKVVDELVKVMGRHKPENIVIEMARENQTTQKGQKNSRERMKRIEEGIKELGSQILKEHPVENTQLQNEKLYLYYLQNGRDMYVDQELDINRLSDYDVDHIVPQSFLKDDSIDNKVLTRSDKARGKSDNVPSEEVVKKMKNYWRQLLNAKLITQRKFDNLTKAERGGLSELDKAGFIKRQLVETRQITKHVAQILDSRMNTKYDENDKLIREVKVITLKSKLVSDFRKDFQFYKVREINNYHHAHDAYLNAVVGTALIKKYPKLESEFVYGDYKVYDVRKMIAKSEQEIGKATAKYFFYSNIMNFFKTEITLANGEIRKRPLIETNGETGEIVWDKGRDFATVRKVLSMPQVNIVKKTEVQTGGFSKESILPKRNSDKLIARKKDWDPKKYGGFDSPTVAYSVLVVAKVEKGKSKKLKSVKELLGITIMERSSFEKNPIDFLEAKGYKEVKKDLIIKLPKYSLFELENGRKRMLASAGELQKGNELALPSKYVNFLYLASHYEKLKGSPEDNEQKQLFVEQHKHYLDEIIEQISEFSKRVILADANLDKVLSAYNKHRDKPIREQAENIIHLFTLTNLGAPAAFKYFDTTIDRKRYTSTKEVLDATLIHQSITGLYETRIDLSQLGGDGGPAPGGGGSSGGTLNLEDEYRLYETSAEPEVSPGSTWLSDFPQAWAETGGMGLAVRQAPLIIPLKATSTPVSIKQYPMSQEAKLGIKPHIQRLLDQGILVPCQSPWNTPLLPVKKPGTNDYRPVQDLREVNKRVEDIHPTVPNPYNLLSGLPPSHRWYTVLDLKDAFFCLRLHPTSQPLFAFEWRDPGMGISGQLTWTRLPQGFKNSPTLFNEALHRDLADFRIQHPDLILLQYVDDILLAATSELDCQQGTRALLLTLGNLGYRASAKKAQLCQKQVKYLGYLLKEGQRWLTEARKETVMGQPTPKTPRQLREFLGTAGFCRLWIPGFAEMAAPLYPLTKPGTLFNWGPDQQKAYQEIKQALLTAPALGLPDLTKPFELFVDEKQGYAKGVLTQKLGPWRRPVAYLSKKLDPVAAGWPPCLRMVAAIAVLRKDAGKLTMGQPLVILAPHAVEALVKQPPDRWLSNARMTHYQAMLLDTDRVQFGPVVALNPATLLPLPEEGAPHDCLEILAETHGTRPDLTDQPIPDADHTWYTDGSSFLQEGQRKAGAAVTTETEVIWARALPAGTSAQRAELIALTQALKMAEGKRLNVYTDSRYAFATAHIHGEIYRRRGWLTSEGREIKNKSEILALLKALFLPKRLSIIHCLGHQKGDSAEARGNRLADQAAREAAIKTPPDTSTLLAGKRTADGSEFEKRTADGSEFESPKKKAKVE

SEQ ID NO: 7420 - protein, 2094 aa, synthetic construct
MPAAKRVKLDGGDKKYSIGLDIGTNSVGWAVITDEYKVPSKKFKVLGNTDRHSIKKNLIGALLFDSGETAEATRLKRTARRRYTRRKNRICYLQEIFSNEMAKVDDSFFHRLEESFLVEEDKKHERHPIFGNIVDEVAYHEKYPTIYHLRKKLVDSTDKADLRLIYLALAHMIKFRGHFLIEGDLNPDNSDVDKLFIQLVQTYNQLFEENPINASGVDAKAILSARLSKSRRLENLIAQLPGEKKNGLFGNLIALSLGLTPNFKSNFDLAEDAKLQLSKDTYDDDLDNLLAQIGDQYADLFLAAKNLSDAILLSDILRVNTEITKAPLSASMIKRYDEHHQDLTLLKALVRQQLPEKYKEIFFDQSKNGYAGYIDGGASQEEFYKFIKPILEKMDGTEELLVKLNREDLLRKQRTFDNGSIPHQIHLGELHAILRRQEDFYPFLKDNREKIEKILTFRIPYYVGPLARGNSRFAWMTRKSEETITPWNFEEVVDKGASAQSFIERMTNFDKNLPNEKVLPKHSLLYEYFTVYNELTKVKYVTEGMRKPAFLSGEQKKAIVDLLFKTNRKVTVKQLKEDYFKKIECFDSVEISGVEDRFNASLGTYHDLLKIIKDKDFLDNEENEDILEDIVLTLTLFEDREMIEERLKTYAHLFDDKVMKQLKRRRYTGWGRLSRKLINGIRDKQSGKTILDFLKSDGFANRNFMQLIHDDSLTFKEDIQKAQVSGQGDSLHEHIANLAGSPAIKKGILQTVKVVDELVKVMGRHKPENIVIEMARENQTTQKGQKNSRERMKRIEEGIKELGSQILKEHPVENTQLQNEKLYLYYLQNGRDMYVDQELDINRLSDYDVDHIVPQSFLKDDSIDNKVLTRSDKARGKSDNVPSEEVVKKMKNYWRQLLNAKLITQRKFDNLTKAERGGLSELDKAGFIKRQLVETRQITKHVAQILDSRMNTKYDENDKLIREVKVITLKSKLVSDFRKDFQFYKVREINNYHHAHDAYLNAVVGTALIKKYPKLESEFVYGDYKVYDVRKMIAKSEQEIGKATAKYFFYSNIMNFFKTEITLANGEIRKRPLIETNGETGEIVWDKGRDFATVRKVLSMPQVNIVKKTEVQTGGFSKESILPKRNSDKLIARKKDWDPKKYGGFDSPTVAYSVLVVAKVEKGKSKKLKSVKELLGITIMERSSFEKNPIDFLEAKGYKEVKKDLIIKLPKYSLFELENGRKRMLASAGELQKGNELALPSKYVNFLYLASHYEKLKGSPEDNEQKQLFVEQHKHYLDEIIEQISEFSKRVILADANLDKVLSAYNKHRDKPIREQAENIIHLFTLTNLGAPAAFKYFDTTIDRKRYTSTKEVLDATLIHQSITGLYETRIDLSQLGGDGGPAPGGGGSSGGTLGIEDEYRLHETSTEPDVSLGSTWLSDFPQAWAETGGMGLAVRQAPLIIPLKATSTPVSIQQYPMSHEARLGIKPHIQRLLDQGILVPCQSPWNTPLLPVKKPGTNDYRPVQDLREVNKRVEDIHPTVPNPYNLLSGLPPSHQWYTVLDLKDAFFCLRLHPTSQPLFAFEWRDPGMGISGQLTWTRLPQGFKNSPTLFDEALHRDLADFRIQHPDLILLQYVDDILLAATSELDCQQGTRALLQTLGDLGYRASAKKAQICQKQVKYLGYLLREGQRWLTEARKETVMGQPVPKTPRQLREFLGTAGFCRLWIPGFAEMAAPLYPLTKTGTLFSWGPDQQKAYQEIKQALLTAPALGLPDLTKPFELFVDEKQGYAKGVLTQKLGPWRRPVAYLSKKLDPVAAGWPPCLRMVAAIAVLTKDAGKLTMGQPLVILAPHAVEALVKQPPDRWLSNARMTHYQAMLLDTDRVQFGPVVALNPATLLPLPEEGAPHDCLEILAETHGTRPDLTDQPIPDADHTWYTDGSSFLQEGQRKAGAAVTTETEVIWAGALPAGTSAQRAELIALTQALKMAEGKRLNVYTDSRYAFATAHIHGEIYRRRGLLTSEGREIKNKSEILALLKALFLPKRLSIIHCLGHQKGDSAEARGNRLADQAAREAAIKTPPDTSTLLAGKRTADGSEFEKRTADGSEFESPKKKAKVE

SEQ ID NO: 7421 - protein, 2094 aa, synthetic construct
MPAAKRVKLDGGDKKYSIGLDIGTNSVGWAVITDEYKVPSKKFKVLGNTDRHSIKKNLIGALLFDSGETAEATRLKRTARRRYTRRKNRICYLQEIFSNEMAKVDDSFFHRLEESFLVEEDKKHERHPIFGNIVDEVAYHEKYPTIYHLRKKLVDSTDKADLRLIYLALAHMIKFRGHFLIEGDLNPDNSDVDKLFIQLVQTYNQLFEENPINASGVDAKAILSARLSKSRRLENLIAQLPGEKKNGLFGNLIALSLGLTPNFKSNFDLAEDAKLQLSKDTYDDDLDNLLAQIGDQYADLFLAAKNLSDAILLSDILRVNTEITKAPLSASMIKRYDEHHQDLTLLKALVRQQLPEKYKEIFFDQSKNGYAGYIDGGASQEEFYKFIKPILEKMDGTEELLVKLNREDLLRKQRTFDNGSIPHQIHLGELHAILRRQEDFYPFLKDNREKIEKILTFRIPYYVGPLARGNSRFAWMTRKSEETITPWNFEEVVDKGASAQSFIERMTNFDKNLPNEKVLPKHSLLYEYFTVYNELTKVKYVTEGMRKPAFLSGEQKKAIVDLLFKTNRKVTVKQLKEDYFKKIECFDSVEISGVEDRFNASLGTYHDLLKIIKDKDFLDNEENEDILEDIVLTLTLFEDREMIEERLKTYAHLFDDKVMKQLKRRRYTGWGRLSRKLINGIRDKQSGKTILDFLKSDGFANRNFMQLIHDDSLTFKEDIQKAQVSGQGDSLHEHIANLAGSPAIKKGILQTVKVVDELVKVMGRHKPENIVIEMARENQTTQKGQKNSRERMKRIEEGIKELGSQILKEHPVENTQLQNEKLYLYYLQNGRDMYVDQELDINRLSDYDVDHIVPQSFLKDDSIDNKVLTRSDKARGKSDNVPSEEVVKKMKNYWRQLLNAKLITQRKFDNLTKAERGGLSELDKAGFIKRQLVETRQITKHVAQILDSRMNTKYDENDKLIREVKVITLKSKLVSDFRKDFQFYKVREINNYHHAHDAYLNAVVGTALIKKYPKLESEFVYGDYKVYDVRKMIAKSEQEIGKATAKYFFYSNIMNFFKTEITLANGEIRKRPLIETNGETGEIVWDKGRDFATVRKVLSMPQVNIVKKTEVQTGGFSKESILPKRNSDKLIARKKDWDPKKYGGFDSPTVAYSVLVVAKVEKGKSKKLKSVKELLGITIMERSSFEKNPIDFLEAKGYKEVKKDLIIKLPKYSLFELENGRKRMLASAGELQKGNELALPSKYVNFLYLASHYEKLKGSPEDNEQKQLFVEQHKHYLDEIIEQISEFSKRVILADANLDKVLSAYNKHRDKPIREQAENIIHLFTLTNLGAPAAFKYFDTTIDRKRYTSTKEVLDATLIHQSITGLYETRIDLSQLGGDGGPAPGGGGSSGGTLGIEDEYRLHETSTEPDVSLGSTWLSDFPQAWAETGGMGLAVRQAPLIIPLKATSTPVSIQQYPMSHEARLGIKPHIQRLLDQGILVPCQSPWNTPLLPVKKPGTNDYRPVQDLREVNKRVEDIHPTVPNPYNLLSGLPPSHQWYTVLDLKDAFFCLRLHPTSQPLFAFEWRDPGMGISGQLTWTRLPQGFKNSPTLFNEALHRDLADFRIQHPDLILLQYVDDILLAATSELDCQQGTRALLQTLGDLGYRASAKKAQICQKQVKYLGYLLREGQRWLTEARKETVMGQPVPKTPRQLREFLGTAGFCRLWIPGFAEMAAPLYPLTKPGTLFSWGPDQQKAYQEIKQALLTAPALGLPDLTKPFELFVDEKQGYAKGVLTQKLGPWRRPVAYLSKKLDPVAAGWPPCLRMVAAIAVLTKDAGKLTMGQPLVILAPHAVEALVKQPPDRWLSNARMTHYQAMLLDTDRVQFGPVVALNPATLLPLPEEGAPHDCLEILAETHGTRPDLTDQPIPDADHTWYTDGSSFLQEGQRKAGAAVTTETEVIWAGALPAGTSAQRAELIALTQALKMAEGKRLNVYTDSRYAFATAHIHGEIYRRRGWLTSEGREIKNKSEILALLKALFLPKRLSIIHCLGHQKGDSAEARGNRLADQAAREAAIKTPPDTSTLLAGKRTADGSEFEKRTADGSEFESPKKKAKVE

SEQ ID NO: 7422 - protein, 2094 aa, synthetic construct; identical to SEQ ID NO: 7421

SEQ ID NO: 7423 - protein, 2094 aa, synthetic construct
MPAAKRVKLDGGDKKYSIGLDIGTNSVGWAVITDEYKVPSKKFKVLGNTDRHSIKKNLIGALLFDSGETAEATRLKRTARRRYTRRKNRICYLQEIFSNEMAKVDDSFFHRLEESFLVEEDKKHERHPIFGNIVDEVAYHEKYPTIYHLRKKLVDSTDKADLRLIYLALAHMIKFRGHFLIEGDLNPDNSDVDKLFIQLVQTYNQLFEENPINASGVDAKAILSARLSKSRRLENLIAQLPGEKKNGLFGNLIALSLGLTPNFKSNFDLAEDAKLQLSKDTYDDDLDNLLAQIGDQYADLFLAAKNLSDAILLSDILRVNTEITKAPLSASMIKRYDEHHQDLTLLKALVRQQLPEKYKEIFFDQSKNGYAGYIDGGASQEEFYKFIKPILEKMDGTEELLVKLNREDLLRKQRTFDNGSIPHQIHLGELHAILRRQEDFYPFLKDNREKIEKILTFRIPYYVGPLARGNSRFAWMTRKSEETITPWNFEEVVDKGASAQSFIERMTNFDKNLPNEKVLPKHSLLYEYFTVYNELTKVKYVTEGMRKPAFLSGEQKKAIVDLLFKTNRKVTVKQLKEDYFKKIECFDSVEISGVEDRFNASLGTYHDLLKIIKDKDFLDNEENEDILEDIVLTLTLFEDREMIEERLKTYAHLFDDKVMKQLKRRRYTGWGRLSRKLINGIRDKQSGKTILDFLKSDGFANRNFMQLIHDDSLTFKEDIQKAQVSGQGDSLHEHIANLAGSPAIKKGILQTVKVVDELVKVMGRHKPENIVIEMARENQTTQKGQKNSRERMKRIEEGIKELGSQILKEHPVENTQLQNEKLYLYYLQNGRDMYVDQELDINRLSDYDVDHIVPQSFLKDDSIDNKVLTRSDKARGKSDNVPSEEVVKKMKNYWRQLLNAKLITQRKFDNLTKAERGGLSELDKAGFIKRQLVETRQITKHVAQILDSRMNTKYDENDKLIREVKVITLKSKLVSDFRKDFQFYKVREINNYHHAHDAYLNAVVGTALIKKYPKLESEFVYGDYKVYDVRKMIAKSEQEIGKATAKYFFYSNIMNFFKTEITLANGEIRKRPLIETNGETGEIVWDKGRDFATVRKVLSMPQVNIVKKTEVQTGGFSKESILPKRNSDKLIARKKDWDPKKYGGFDSPTVAYSVLVVAKVEKGKSKKLKSVKELLGITIMERSSFEKNPIDFLEAKGYKEVKKDLIIKLPKYSLFELENGRKRMLASAGELQKGNELALPSKYVNFLYLASHYEKLKGSPEDNEQKQLFVEQHKHYLDEIIEQISEFSKRVILADANLDKVLSAYNKHRDKPIREQAENIIHLFTLTNLGAPAAFKYFDTTIDRKRYTSTKEVLDATLIHQSITGLYETRIDLSQLGGDGGPAPGGGGSSGGTLNIEDEYRLHETSKEPDVSLGSTWLSDFPQAWAETGGMGLAVRQAPLIIPLKATSTPVSIKQYPMSQEARLGIKPHIQRLLDQGILVPCQSPWNTPLLPVKKPGTNDYRPVQDLREVNKRVEDIHPTVPNPYNLLSGLPPSHQWYTVLDLKDAFFCLRLHPTSQPLFAFEWRDPEMGISGQLTWTRLPQGFKNSPTLFDEALHRDLAGFRIQHPDLILLQYVDDLLLAATSELDCQQGTRALLQTLGDLGYRASAKKAQICQKQVKYLGYLLKEGQRWLTEARKETVMGQPIPKTPRQLREFLGTAGFCRLWIPGFAEMAAPLYPLTKTGTLFNWGPDQQKAFQEIKQALLTAPALGLPDLTKPFELFVDEKQGYAKGVLTQKLGPWRRPVAYLSKKLDPVAAGWPPCLRMVAAIAVLTKDAGKLTMGQPLVILAPHAVEALVKQPPDRWLSNARMTHYQALLLDTDRVQFGPVVALNPATLLPLPEEGLQHDCLDILAEAHGTRSDLMDQPLPDADHTWYTDGSSFLQEGQRKAGAAVTTETEVIWARALPAGTSAQRAELIALTQALKMAEGKKLNVYTDSRYAFATAHIHGEIYRRRGLLTSEGKEIKNKDEILALLKALFLPKRLSIIHCPGHQKGNSAEARGNRMADQAAREVATRETPETSTLLAGKRTADGSEFEKRTADGSEFESPKKKAKVE

SEQ ID NO: 7424 - protein, 2094 aa, synthetic construct
MPAAKRVKLDGGDKKYSIGLDIGTNSVGWAVITDEYKVPSKKFKVLGNTDRHSIKKNLIGALLFDSGETAEATRLKRTARRRYTRRKNRICYLQEIFSNEMAKVDDSFFHRLEESFLVEEDKKHERHPIFGNIVDEVAYHEKYPTIYHLRKKLVDSTDKADLRLIYLALAHMIKFRGHFLIEGDLNPDNSDVDKLFIQLVQTYNQLFEENPINASGVDAKAILSARLSKSRRLENLIAQLPGEKKNGLFGNLIALSLGLTPNFKSNFDLAEDAKLQLSKDTYDDDLDNLLAQIGDQYADLFLAAKNLSDAILLSDILRVNTEITKAPLSASMIKRYDEHHQDLTLLKALVRQQLPEKYKEIFFDQSKNGYAGYIDGGASQEEFYKFIKPILEKMDGTEELLVKLNREDLLRKQRTFDNGSIPHQIHLGELHAILRRQEDFYPFLKDNREKIEKILTFRIPYYVGPLARGNSRFAWMTRKSEETITPWNFEEVVDKGASAQSFIERMTNFDKNLPNEKVLPKHSLLYEYFTVYNELTKVKYVTEGMRKPAFLSGEQKKAIVDLLFKTNRKVTVKQLKEDYFKKIECFDSVEISGVEDRFNASLGTYHDLLKIIKDKDFLDNEENEDILEDIVLTLTLFEDREMIEERLKTYAHLFDDKVMKQLKRRRYTGWGRLSRKLINGIRDKQSGKTILDFLKSDGFANRNFMQLIHDDSLTFKEDIQKAQVSGQGDSLHEHIANLAGSPAIKKGILQTVKVVDELVKVMGRHKPENIVIEMARENQTTQKGQKNSRERMKRIEEGIKELGSQILKEHPVENTQLQNEKLYLYYLQNGRDMYVDQELDINRLSDYDVDHIVPQSFLKDDSIDNKVLTRSDKARGKSDNVPSEEVVKKMKNYWRQLLNAKLITQRKFDNLTKAERGGLSELDKAGFIKRQLVETRQITKHVAQILDSRMNTKYDENDKLIREVKVITLKSKLVSDFRKDFQFYKVREINNYHHAHDAYLNAVVGTALIKKYPKLESEFVYGDYKVYDVRKMIAKSEQEIGKATAKYFFYSNIMNFFKTEITLANGEIRKRPLIETNGETGEIVWDKGRDFATVRKVLSMPQVNIVKKTEVQTGGFSKESILPKRNSDKLIARKKDWDPKKYGGFDSPTVAYSVLVVAKVEKGKSKKLKSVKELLGITIMERSSFEKNPIDFLEAKGYKEVKKDLIIKLPKYSLFELENGRKRMLASAGELQKGNELALPSKYVNFLYLASHYEKLKGSPEDNEQKQLFVEQHKHYLDEIIEQISEFSKRVILADANLDKVLSAYNKHRDKPIREQAENIIHLFTLTNLGAPAAFKYFDTTIDRKRYTSTKEVLDATLIHQSITGLYETRIDLSQLGGDGGPAPGGGGSSGGTLNIEDEYRLHETSKGPDVPLGSTWLSDFPQAWAETGGMGLAVRQAPLIIPLKATSTPVSIKQYPMSQEARLGIKPHIQRLLDQGILVPCQSPWNTPLLPVKKPGTNDYRPVQDLREVNKRVEDIHPTVPNPYNLLSGLPPSHQWYTVLDLKDAFFCLRLHPTSQSLFAFEWRDPEMGISGQLTWTRLPQGFKNSPTLFNEALHRDLADFRIQHPDLILLQYVDDLLLAATSELDCQQGTRALLQTLGDLGYRASAKKAQICQKQVKYLGYLLKEGQRWLTEARKETVMGQPTPKTPRQLREFLGKAGFCRLFIPGFAEMAAPLYPLTKPGTLFEWGPDQQKAYQEIKQALLTAPALGLPDLTKPFELFVDEKQGYAKGVLTQKLGPWRRPVAYLSKKLDPVAAGWPPCLRMVAAIAVLTKDAGKLTMGQPLVILAPHAVEALVKQPPDRWLSNARMTHYQALLLDTDRVQFGPIVALNPATLLPLPEEGLQHDCLDILAEAHGTRPDLTDQPLPDADHTWYTDGSSFLQEGQRKAGAAVTTETEVVWAKALPAGTSAQRAELIALTQALKMAEGKKLNVYTDSRYAFATAHIHGEIYRRRGWLTSEGKEIKNKDEILALLKALFLPKRLSIIHCPGHQKGNRAEARGNRMADQAAREVATRETPETSTLLAGKRTADGSEFEKRTADGSEFESPKKKAKVE

SEQ ID NO: 7425 - protein, 2094 aa, synthetic construct
MPAAKRVKLDGGDKKYSIGLDIGTNSVGWAVITDEYKVPSKKFKVLGNTDRHSIKKNLIGALLFDSGETAEATRLKRTARRRYTRRKNRICYLQEIFSNEMAKVDDSFFHRLEESFLVEEDKKHERHPIFGNIVDEVAYHEKYPTIYHLRKKLVDSTDKADLRLIYLALAHMIKFRGHFLIEGDLNPDNSDVDKLFIQLVQTYNQLFEENPINASGVDAKAILSARLSKSRRLENLIAQLPGEKKNGLFGNLIALSLGLTPNFKSNFDLAEDAKLQLSKDTYDDDLDNLLAQIGDQYADLFLAAKNLSDAILLSDILRVNTEITKAPLSASMIKRYDEHHQDLTLLKALVRQQLPEKYKEIFFDQSKNGYAGYIDGGASQEEFYKFIKPILEKMDGTEELLVKLNREDLLRKQRTFDNGSIPHQIHLGELHAILRRQEDFYPFLKDNREKIEKILTFRIPYYVGPLARGNSRFAWMTRKSEETITPWNFEEVVDKGASAQSFIERMTNFDKNLPNEKVLPKHSLLYEYFTVYNELTKVKYVTEGMRKPAFLSGEQKKAIVDLLFKTNRKVTVKQLKEDYFKKIECFDSVEISGVEDRFNASLGTYHDLLKIIKDKDFLDNEENEDILEDIVLTLTLFEDREMIEERLKTYAHLFDDKVMKQLKRRRYTGWGRLSRKLINGIRDKQSGKTILDFLKSDGFANRNFMQLIHDDSLTFKEDIQKAQVSGQGDSLHEHIANLAGSPAIKKGILQTVKVVDELVKVMGRHKPENIVIEMARENQTTQKGQKNSRERMKRIEEGIKELGSQILKEHPVENTQLQNEKLYLYYLQNGRDMYVDQELDINRLSDYDVDHIVPQSFLKDDSIDNKVLTRSDKARGKSDNVPSEEVVKKMKNYWRQLLNAKLITQRKFDNLTKAERGGLSELDKAGFIKRQLVETRQITKHVAQILDSRMNTKYDENDKLIREVKVITLKSKLVSDFRKDFQFYKVREINNYHHAHDAYLNAVVGTALIKKYPKLESEFVYGDYKVYDVRKMIAKSEQEIGKATAKYFFYSNIMNFFKTEITLANGEIRKRPLIETNGETGEIVWDKGRDFATVRKVLSMPQVNIVKKTEVQTGGFSKESILPKRNSDKLIARKKDWDPKKYGGFDSPTVAYSVLVVAKVEKGKSKKLKSVKELLGITIMERSSFEKNPIDFLEAKGYKEVKKDLIIKLPKYSLFELENGRKRMLASAGELQKGNELALPSKYVNFLYLASHYEKLKGSPEDNEQKQLFVEQHKHYLDEIIEQISEFSKRVILADANLDKVLSAYNKHRDKPIREQAENIIHLFTLTNLGAPAAFKYFDTTIDRKRYTSTKEVLDATLIHQSITGLYETRIDLSQLGGDGGPAPGGGGSSGGTLNIEDEHRLHETSKEPDVSLGSTWLSDFPQAWAETGGMGLAVRQAPLIIPLKATSTPVSIKQYPMSQEARLGIKPHIQRLLDQGILVPCQSPWNTPLLPVKKPGTNDYRPVQDLREVNKRVEDIHPTVPNPYNLLSGLPPSHQWYTVLDLKDAFFCLRLHPTSQPLFAFEWRDPEMGISGQLTWTRLPQGFKNSPTLFNEALHRDLADFRIQHPDLILLQYVDDLLLAATSELDCQQGTRALLQTLGNLGYRASAKKAQICQKQVKYLGYLLKEGQRWLTEARKETVMGQPTPKTPRQLREFLGTAGFCRLWIPGFAEMAAPLYPLTKPGTLFNWGPDQQKAYQEIKQALLTAPALGLPDLTKPFELFVDEKQGYAKGVLTQKLGPWRRPVAYLSKKLDPVAAGWPPCLRMVAAIAVLTKDAGKLTMGQPLVILAPHAVEALVKQPPDRWLSNARMTHYQALLLDTDRVQFGPVVALNPATLLPLPEEGLQHNCLDILAEAHGTRPDLTDQPLPDADHTWYTDGSSLLQEGQRKAGAAVTTETEVIWAKALPAGTSAQRAELIALTQALKMAEGKKLNVYTDSRYAFATAHIHGEIYRRRGWLTSEGKEIKNKDEILALLKALFLPKRLSIIHCPGHQKGHSAEARGNRMADQAARKAAITETPDTSTLLAGKRTADGSEFEKRTADGSEFESPKKKAKVE

SEQ ID NO: 7426 - protein, 2094 aa, synthetic construct; identical to SEQ ID NO: 7425

SEQ ID NO: 7427 - protein, 2114 aa, synthetic construct
MPAAKRVKLDGGDKKYSIGLDIGTNSVGWAVITDEYKVPSKKFKVLGNTDRHSIKKNLIGALLFDSGETAEATRLKRTARRRYTRRKNRICYLQEIFSNEMAKVDDSFFHRLEESFLVEEDKKHERHPIFGNIVDEVAYHEKYPTIYHLRKKLVDSTDKADLRLIYLALAHMIKFRGHFLIEGDLNPDNSDVDKLFIQLVQTYNQLFEENPINASGVDAKAILSARLSKSRRLENLIAQLPGEKKNGLFGNLIALSLGLTPNFKSNFDLAEDAKLQLSKDTYDDDLDNLLAQIGDQYADLFLAAKNLSDAILLSDILRVNTEITKAPLSASMIKRYDEHHQDLTLLKALVRQQLPEKYKEIFFDQSKNGYAGYIDGGASQEEFYKFIKPILEKMDGTEELLVKLNREDLLRKQRTFDNGSIPHQIHLGELHAILRRQEDFYPFLKDNREKIEKILTFRIPYYVGPLARGNSRFAWMTRKSEETITPWNFEEVVDKGASAQSFIERMTNFDKNLPNEKVLPKHSLLYEYFTVYNELTKVKYVTEGMRKPAFLSGEQKKAIVDLLFKTNRKVTVKQLKEDYFKKIECFDSVEISGVEDRFNASLGTYHDLLKIIKDKDFLDNEENEDILEDIVLTLTLFEDREMIEERLKTYAHLFDDKVMKQLKRRRYTGWGRLSRKLINGIRDKQSGKTILDFLKSDGFANRNFMQLIHDDSLTFKEDIQKAQVSGQGDSLHEHIANLAGSPAIKKGILQTVKVVDELVKVMGRHKPENIVIEMARENQTTQKGQKNSRERMKRIEEGIKELGSQILKEHPVENTQLQNEKLYLYYLQNGRDMYVDQELDINRLSDYDVDHIVPQSFLKDDSIDNKVLTRSDKARGKSDNVPSEEVVKKMKNYWRQLLNAKLITQRKFDNLTKAERGGLSELDKAGFIKRQLVETRQITKHVAQILDSRMNTKYDENDKLIREVKVITLKSKLVSDFRKDFQFYKVREINNYHHAHDAYLNAVVGTALIKKYPKLESEFVYGDYKVYDVRKMIAKSEQEIGKATAKYFFYSNIMNFFKTEITLANGEIRKRPLIETNGETGEIVWDKGRDFATVRKVLSMPQVNIVKKTEVQTGGFSKESILPKRNSDKLIARKKDWDPKKYGGFDSPTVAYSVLVVAKVEKGKSKKLKSVKELLGITIMERSSFEKNPIDFLEAKGYKEVKKDLIIKLPKYSLFELENGRKRMLASAGELQKGNELALPSKYVNFLYLASHYEKLKGSPEDNEQKQLFVEQHKHYLDEIIEQISEFSKRVILADANLDKVLSAYNKHRDKPIREQAENIIHLFTLTNLGAPAAFKYFDTTIDRKRYTSTKEVLDATLIHQSITGLYETRIDLSQLGGDGGPAPGGGGSSGGVQEISDSRPMLHIYLNGRRFLGLLDTGADKTCIAGRDWPANWPIHQTESSLQGLGMACGVARSSQPLRWQHEDKSGIIHPFVIPTLPFTLWGRDIMKDIKVRLMTDSPDDSQDLMIGAIESNLFADQISWKSDQPVWLNQWPLKQEKLQALQQLVTEQLQLGHLEESNSPWNTPVFVIKKKSGKWRLLQDLRAVNATMHDMGALQPGLPSPVAVPKGWEIIIIDLQDCFFNIKLHPEDCKRFAFSVPSPNFKRPYQRFQWKVLPQGMKNSPTLCQKFVDKAILTVRDKYQDSYIVHYMDDILLAHPSRSIVDEILTSMIQALNKHGLVVSTEKIQKYDNLKYLGTHIQGDSVSYQKLQIRTDKLRTLNDFQKLLGNINWIRPFLKLTTGELKPLFEILNPDSNPISTRKLTPEACKALQLMNERLSTARVKRLDLSQPWSLCILKTEYTPTACLWQDGVVEWIHLPHISPKVITPYDIFCTQLIIKGRHRSKELFSKDPDYIVVPYTKVQFDLLLQEKEDWPISLLGFLGEVHFHLPKDPLLTFTLQTAIIFPHMTSTTPLEKGIVIFTDGSANGRSVTYIQGREPIIKENTQNTAQQAEIVAVITAFEEVSQPFNLYTDSKYVTGLFPEIETATLSPRTKIYTELKHLQRLIHKRQEKFYIGHIRGHTGLPGPLAQGNAYADSLTRILTAAGKRTADGSEFEKRTADGSEFESPKKKAKVE

SEQ ID NO: 7428 - protein, 2114 aa, synthetic construct
MPAAKRVKLDGGDKKYSIGLDIGTNSVGWAVITDEYKVPSKKFKVLGNTDRHSIKKNLIGALLFDSGETAEATRLKRTARRRYTRRKNRICYLQEIFSNEMAKVDDSFFHRLEESFLVEEDKKHERHPIFGNIVDEVAYHEKYPTIYHLRKKLVDSTDKADLRLIYLALAHMIKFRGHFLIEGDLNPDNSDVDKLFIQLVQTYNQLFEENPINASGVDAKAILSARLSKSRRLENLIAQLPGEKKNGLFGNLIALSLGLTPNFKSNFDLAEDAKLQLSKDTYDDDLDNLLAQIGDQYADLFLAAKNLSDAILLSDILRVNTEITKAPLSASMIKRYDEHHQDLTLLKALVRQQLPEKYKEIFFDQSKNGYAGYIDGGASQEEFYKFIKPILEKMDGTEELLVKLNREDLLRKQRTFDNGSIPHQIHLGELHAILRRQEDFYPFLKDNREKIEKILTFRIPYYVGPLARGNSRFAWMTRKSEETITPWNFEEVVDKGASAQSFIERMTNFDKNLPNEKVLPKHSLLYEYFTVYNELTKVKYVTEGMRKPAFLSGEQKKAIVDLLFKTNRKVTVKQLKEDYFKKIECFDSVEISGVEDRFNASLGTYHDLLKIIKDKDFLDNEENEDILEDIVLTLTLFEDREMIEERLKTYAHLFDDKVMKQLKRRRYTGWGRLSRKLINGIRDKQSGKTILDFLKSDGFANRNFMQLIHDDSLTFKEDIQKAQVSGQGDSLHEHIANLAGSPAIKKGILQTVKVVDELVKVMGRHKPENIVIEMARENQTTQKGQKNSRERMKRIEEGIKELGSQILKEHPVENTQLQNEKLYLYYLQNGRDMYVDQELDINRLSDYDVDHIVPQSFLKDDSIDNKVLTRSDKARGKSDNVPSEEVVKKMKNYWRQLLNAKLITQRKFDNLTKAERGGLSELDKAGFIKRQLVETRQITKHVAQILDSRMNTKYDENDKLIREVKVITLKSKLVSDFRKDFQFYKVREINNYHHAHDAYLNAVVGTALIKKYPKLESEFVYGDYKVYDVRKMIAKSEQEIGKATAKYFFYSNIMNFFKTEITLANGEIRKRPLIETNGETGEIVWDKGRDFATVRKVLSMPQVNIVKKTEVQTGGFSKESILPKRNSDKLIARKKDWDPKKYGGFDSPTVAYSVLVVAKVEKGKSKKLKSVKELLGITIMERSSFEKNPIDFLEAKGYKEVKKDLIIKLPKYSLFELENGRKRMLASAGELQKGNELALPSKYVNFLYLASHYEKLKGSPEDNEQKQLFVEQHKHYLDEIIEQISEFSKRVILADANLDKVLSAYNKHRDKPIREQAENIIHLFTLTNLGAPAAFKYFDTTIDRKRYTSTKEVLDATLIHQSITGLYETRIDLSQLGGDGGPAPGGGGSSGGVQEISDSRPMLHIYLNGRRFLGLLDTGADKTCIAGRDWPANWPIHQTESSLQGLGMACGVARSSQPLRWQHEDKSGIIHPFVIPTLPFTLWGRDIMKDIKVRLMTDSPDDSQDLMIGAIESNLFADQISWKSDQPVWLNQWPLKQEKLQALQQLVTEQLQLGHLEESNSPWNTPVFVIKKKSGKWRLLQDLRAVNATMHDMGALQPGLPSPVAVPKGWEIIIIDLQDCFFNIKLHPEDCKRFAFSVPSPNFKRPYQRFQWKVLPQGMKNSPTLCQKFVDKAILTVRDKYQDSYIVHYMDDILLAHPSRSIVDEILTSMIQALNKHGLVVSTEKIQKYDNLKYLGTHIQGDSVSYQKLQIRTDKLRTLNDFQKLLGNINWIRPFLKLTTGELKPLFEILNGDSNPISTRKLTPEACKALQLMNERLSTARVKRLDLSQPWSLCILKTEYTPTACLWQDGVVEWIHLPHISPKVITPYDIFCTQLIIKGRHRSKELFSKDPDYIVVPYTKVQFDLLLQEKEDWPISLLGFLGEVHFHLPKDPLLTFTLQTAIIFPHMTSTTPLEKGIVIFTDGSANGRSVTYIQGREPIIKENTQNTAQQAEIVAVITAFEEVSQPFNLYTDSKYVTGLFPEIETATLSPRTKIYTELKHLQRLIHKRQEKFYIGHIRGHTGLPGPLAQGNAYADSLTRILTAAGKRTADGSEFEKRTADGSEFESPKKKAKVE

SEQ ID NO: 7429 - protein, 2086 aa, synthetic construct
MPAAKRVKLDGGDKKYSIGLDIGTNSVGWAVITDEYKVPSKKFKVLGNTDRHSIKKNLIGALLFDSGETAEATRLKRTARRRYTRRKNRICYLQEIFSNEMAKVDDSFFHRLEESFLVEEDKKHERHPIFGNIVDEVAYHEKYPTIYHLRKKLVDSTDKADLRLIYLALAHMIKFRGHFLIEGDLNPDNSDVDKLFIQLVQTYNQLFEENPINASGVDAKAILSARLSKSRRLENLIAQLPGEKKNGLFGNLIALSLGLTPNFKSNFDLAEDAKLQLSKDTYDDDLDNLLAQIGDQYADLFLAAKNLSDAILLSDILRVNTEITKAPLSASMIKRYDEHHQDLTLLKALVRQQLPEKYKEIFFDQSKNGYAGYIDGGASQEEFYKFIKPILEKMDGTEELLVKLNREDLLRKQRTFDNGSIPHQIHLGELHAILRRQEDFYPFLKDNREKIEKILTFRIPYYVGPLARGNSRFAWMTRKSEETITPWNFEEVVDKGASAQSFIERMTNFDKNLPNEKVLPKHSLLYEYFTVYNELTKVKYVTEGMRKPAFLSGEQKKAIVDLLFKTNRKVTVKQLKEDYFKKIECFDSVEISGVEDRFNASLGTYHDLLKIIKDKDFLDNEENEDILEDIVLTLTLFEDREMIEERLKTYAHLFDDKVMKQLKRRRYTGWGRLSRKLINGIRDKQSGKTILDFLKSDGFANRNFMQLIHDDSLTFKEDIQKAQVSGQGDSLHEHIANLAGSPAIKKGILQTVKVVDELVKVMGRHKPENIVIEMARENQTTQKGQKNSRERMKRIEEGIKELGSQILKEHPVENTQLQNEKLYLYYLQNGRDMYVDQELDINRLSDYDVDHIVPQSFLKDDSIDNKVLTRSDKARGKSDNVPSEEVVKKMKNYWRQLLNAKLITQRKFDNLTKAERGGLSELDKAGFIKRQLVETRQITKHVAQILDSRMNTKYDENDKLIREVKVITLKSKLVSDFRKDFQFYKVREINNYHHAHDAYLNAVVGTALIKKYPKLESEFVYGDYKVYDVRKMIAKSEQEIGKATAKYFFYSNIMNFFKTEITLANGEIRKRPLIETNGETGEIVWDKGRDFATVRKVLSMPQVNIVKKTEVQTGGFSKESILPKRNSDKLIARKKDWDPKKYGGFDSPTVAYSVLVVAKVEKGKSKKLKSVKELLGITIMERSSFEKNPIDFLEAKGYKEVKKDLIIKLPKYSLFELENGRKRMLASAGELQKGNELALPSKYVNFLYLASHYEKLKGSPEDNEQKQLFVEQHKHYLDEIIEQISEFSKRVILADANLDKVLSAYNKHRDKPIREQAENIIHLFTLTNLGAPAAFKYFDTTIDRKRYTSTKEVLDATLIHQSITGLYETRIDLSQLGGDGGPAPGGGGSSGGLDDEYRLYSPLVKPDQNIQFWLEQFPQAWAETAGMGLAKQVPPQVIQLKASATPVSVRQYPLSKEAQEGIRPHVQRLIQQGILVPVQSPWNTPLLPVRKPGTNDYRPVQDLREVNKRVQDIHPTVPNPYNLLCALPPQRSWYTVLDLKDAFFCLRLHPTSQPLFAFEWRDPGTGRTGQLTWTRLPQGFKNSPTIFNEALHRDLANFRIQHPQVTLLQYVDDLLLAGATKQDCLEGTKALLLELSDLGYRASAKKAQICRREVTYLGYSLRDGQRWLTEARKKTVVQIPAPTTAKQVREFLGKAGFCRLFIPGFATLAAPLYPLTKPKGEFSWAPEHQKAFDAIKKALLSAPALALPDVTKPFTLYVDERKGVARGVLTQTLGPWRRPVAYLSKKLDPVASGWPVCLKAIAAVAILVKDADKLTLGQNITVIAPHALENIVRQPPDRWMTNARMTHYQSLLLTERVTFAPPAALNPATLLPEETDEPVTHDCHQLLIEETGVRKDLTDIPLTGEVLTWFTDGSSYVVEGKRMAGAAVVDGTRTIWASSLPEGTSAQKAELMALTQALRLAEGKSINIYTDSRYAFATAHVHGAIYKQRGWLTSAGREIKNKEEILSLLEALHLPKRLAIIHCPGHQKAKDPISRGNQMADRVAKQAAQGVNLLPAGKRTADGSEFEKRTADGSEFESPKKKAKVE

SEQ ID NO: 7430 - protein, 2086 aa, synthetic construct; identical to SEQ ID NO: 7429

SEQ ID NO: 7431 - protein, 2085 aa, synthetic construct
MPAAKRVKLDGGDKKYSIGLDIGTNSVGWAVITDEYKVPSKKFKVLGNTDRHSIKKNLIGALLFDSGETAEATRLKRTARRRYTRRKNRICYLQEIFSNEMAKVDDSFFHRLEESFLVEEDKKHERHPIFGNIVDEVAYHEKYPTIYHLRKKLVDSTDKADLRLIYLALAHMIKFRGHFLIEGDLNPDNSDVDKLFIQLVQTYNQLFEENPINASGVDAKAILSARLSKSRRLENLIAQLPGEKKNGLFGNLIALSLGLTPNFKSNFDLAEDAKLQLSKDTYDDDLDNLLAQIGDQYADLFLAAKNLSDAILLSDILRVNTEITKAPLSASMIKRYDEHHQDLTLLKALVRQQLPEKYKEIFFDQSKNGYAGYIDGGASQEEFYKFIKPILEKMDGTEELLVKLNREDLLRKQRTFDNGSIPHQIHLGELHAILRRQEDFYPFLKDNREKIEKILTFRIPYYVGPLARGNSRFAWMTRKSEETITPWNFEEVVDKGASAQSFIERMTNFDKNLPNEKVLPKHSLLYEYFTVYNELTKVKYVTEGMRKPAFLSGEQKKAIVDLLFKTNRKVTVKQLKEDYFKKIECFDSVEISGVEDRFNASLGTYHDLLKIIKDKDFLDNEENEDILEDIVLTLTLFEDREMIEERLKTYAHLFDDKVMKQLKRRRYTGWGRLSRKLINGIRDKQSGKTILDFLKSDGFANRNFMQLIHDDSLTFKEDIQKAQVSGQGDSLHEHIANLAGSPAIKKGILQTVKVVDELVKVMGRHKPENIVIEMARENQTTQKGQKNSRERMKRIEEGIKELGSQILKEHPVENTQLQNEKLYLYYLQNGRDMYVDQELDINRLSDYDVDHIVPQSFLKDDSIDNKVLTRSDKARGKSDNVPSEEVVKKMKNYWRQLLNAKLITQRKFDNLTKAERGGLSELDKAGFIKRQLVETRQITKHVAQILDSRMNTKYDENDKLIREVKVITLKSKLVSDFRKDFQFYKVREINNYHHAHDAYLNAVVGTALIKKYPKLESEFVYGDYKVYDVRKMIAKSEQEIGKATAKYFFYSNIMNFFKTEITLANGEIRKRPLIETNGETGEIVWDKGRDFATVRKVLSMPQVNIVKKTEVQTGGFSKESILPKRNSDKLIARKKDWDPKKYGGFDSPTVAYSVLVVAKVEKGKSKKLKSVKELLGITIMERSSFEKNPIDFLEAKGYKEVKKDLIIKLPKYSLFELENGRKRMLASAGELQKGNELALPSKYVNFLYLASHYEKLKGSPEDNEQKQLFVEQHKHYLDEIIEQISEFSKRVILADANLDKVLSAYNKHRDKPIREQAENIIHLFTLTNLGAPAAFKYFDTTIDRKRYTSTKEVLDATLIHQSITGLYETRIDLSQLGGDGGPAPGGGGSSGGIPWLMKKPLQLTTLVPLQEYEERLLKQTMLTGSYKEKLQSLFLKYDALWQHWENQVGHRRIKPHHIATGTVNPRPQKQYPINPKAKASIQTVINDLLKQGVLIQQNSIMNTPVYPVPKPDGKWRMVLDYREVNKTIPLIAAQNQHSAGILSSIFRGKYKTTLDLSNGFWAHSITPESYWLTAFTWLGQQYCWTRLPQGFLNSPALFTADVVDLLKEVPNVQVYVDDIYISHDDPREHLEQLEKVFSLLLNAGYVVSLKKSEIAQHEVEFLGFNITKEGRGLTETFKQKLLNITPPRDLKQLQSILGLLNFARNFIPNFSELVKPLYNIIATANGKYITWTTDNSQQLQNIISMLNSAENLEERNPEVRLIMKVNTSPSAGYIRFYNEFAKRPIMYLNYVYTKAEVKFTNTEKLLTTIHKGLIKALDLGMGQEILVYSPIVSMTKIQKTPLPERKALPIRWITWMSYLEDPRIQFHYDKTLPELQQVPTVTDDIIAKIKHPSEFSMVFYTDGSAIKHPNVNKSHNAGMGIAQVQFKPEFTVINTWSIPLGDHTAQLAEVAAVEFACKKALKIDGPVLIVTDSFYVAESVNKELPYWQSNGFFNNKKKPLKHVSKWKSIADCIQLKPDIIIIHEKGHQPTASTFHTEGNNLADKLATQGSYVVNAGKRTADGSEFEKRTADGSEFESPKKKAKVE

SEQ ID NO: 7432 - protein, 2085 aa, synthetic construct
MPAAKRVKLDGGDKKYSIGLDIGTNSVGWAVITDEYKVPSKKFKVLGNTDRHSIKKNLIGALLFDSGETAEATRLKRTARRRYTRRKNRICYLQEIFSNEMAKVDDSFFHRLEESFLVEEDKKHERHPIFGNIVDEVAYHEKYPTIYHLRKKLVDSTDKADLRLIYLALAHMIKFRGHFLIEGDLNPDNSDVDKLFIQLVQTYNQLFEENPINASGVDAKAILSARLSKSRRLENLIAQLPGEKKNGLFGNLIALSLGLTPNFKSNFDLAEDAKLQLSKDTYDDDLDNLLAQIGDQYADLFLAAKNLSDAILLSDILRVNTEITKAPLSASMIKRYDEHHQDLTLLKALVRQQLPEKYKEIFFDQSKNGYAGYIDGGASQEEFYKFIKPILEKMDGTEELLVKLNREDLLRKQRTFDNGSIPHQIHLGELHAILRRQEDFYPFLKDNREKIEKILTFRIPYYVGPLARGNSRFAWMTRKSEETITPWNFEEVVDKGASAQSFIERMTNFDKNLPNEKVLPKHSLLYEYFTVYNELTKVKYVTEGMRKPAFLSGEQKKAIVDLLFKTNRKVTVKQLKEDYFKKIECFDSVEISGVEDRFNASLGTYHDLLKIIKDKDFLDNEENEDILEDIVLTLTLFEDREMIEERLKTYAHLFDDKVMKQLKRRRYTGWGRLSRKLINGIRDKQSGKTILDFLKSDGFANRNFMQLIHDDSLTFKEDIQKAQVSGQGDSLHEHIANLAGSPAIKKGILQTVKVVDELVKVMGRHKPENIVIEMARENQTTQKGQKNSRERMKRIEEGIKELGSQILKEHPVENTQLQNEKLYLYYLQNGRDMYVDQELDINRLSDYDVDHIVPQSFLKDDSIDNKVLTRSDKARGKSDNVPSEEVVKKMKNYWRQLLNAKLITQRKFDNLTKAERGGLSELDKAGFIKRQLVETRQITKHVAQILDSRMNTKYDENDKLIREVKVITLKSKLVSDFRKDFQFYKVREINNYHHAHDAYLNAVVGTALIKKYPKLESEFVYGDYKVYDVRKMIAKSEQEIGKATAKYFFYSNIMNFFKTEITLANGEIRKRPLIETNGETGEIVWDKGRDFATVRKVLSMPQVNIVKKTEVQTGGFSKESILPKRNSDKLIARKKDWDPKKYGGFDSPTVAYSVLVVAKVEKGKSKKLKSVKELLGITIMERSSFEKNPIDFLEAKGYKEVKKDLIIKLPKYSLFELENGRKRMLASAGELQKGNELALPSKYVNFLYLASHYEKLKGSPEDNEQKQLFVEQHKHYLDEIIEQISEFSKRVILADANLDKVLSAYNKHRDKPIREQAENIIHLFTLTNLGAPAAFKYFDTTIDRKRYTSTKEVLDATLIHQSITGLYETRIDLSQLGGDGGPAPGGGGSSGGIPWLMKKPLQLTTLVPLQEYEERLLKQTMLTGSYKEKLQSLFLKYDALWQHWENQVGHRRIKPHHIATGTVNPRPQKQYPINPKAKASIQTVINDLLKQGVLIQQNSIMNTPVYPVPKPDGKWRMVLDYREVNKTIPLIAAQNQHSAGILSSIFRGKYKTTLDLSNGFWAHSITPESYWLTAFTWLGQQYCWTRLPQGFLNSPALFNADVVDLLKEVPNVQVYVDDIYISHDDPREHLEQLEKVFSLLLNAGYVVSLKKSEIAQHEVEFLGFNITKEGRGLTETFKQKLLNITPPRDLKQLQSILGLLNFARNFIPNFSELVKPLYNIIATAPGKYITWTTDNSQQLQNIISMLNSAENLEERNPEVRLIMKVNTSPSAGYIRFYNEFAKRPIMYLNYVYTKAEVKFTNTEKLLTTIHKGLIKALDLGMGQEILVYSPIVSMTKIQKTPLPERKALPIRWITWMSYLEDPRIQFHYDKTLPELQQVPTVTDDIIAKIKHPSEFSMVFYTDGSAIKHPNVNKSHNAGMGIAQVQFKPEFTVINTWSIPLGDHTAQLAEVAAVEFACKKALKIDGPVLIVTDSFYVAESVNKELPYWQSNGFFNNKKKPLKHVSKWKSIADCIQLKPDIIIIHEKGHQPTASTFHTEGNNLADKLATQGSYVVNAGKRTADGSEFEKRTADGSEFESPKKKAKVE

SEQ ID NO: 7433 - protein, 2085 aa, synthetic construct
MPAAKRVKLDGGDKKYSIGLDIGTNSVGWAVITDEYKVPSKKFKVLGNTDRHSIKKNLIGALLFDSGETAEATRLKRTARRRYTRRKNRICYLQEIFSNEMAKVDDSFFHRLEESFLVEEDKKHERHPIFGNIVDEVAYHEKYPTIYHLRKKLVDSTDKADLRLIYLALAHMIKFRGHFLIEGDLNPDNSDVDKLFIQLVQTYNQLFEENPINASGVDAKAILSARLSKSRRLENLIAQLPGEKKNGLFGNLIALSLGLTPNFKSNFDLAEDAKLQLSKDTYDDDLDNLLAQIGDQYADLFLAAKNLSDAILLSDILRVNTEITKAPLSASMIKRYDEHHQDLTLLKALVRQQLPEKYKEIFFDQSKNGYAGYIDGGASQEEFYKFIKPILEKMDGTEELLVKLNREDLLRKQRTFDNGSIPHQIHLGELHAILRRQEDFYPFLKDNREKIEKILTFRIPYYVGPLARGNSRFAWMTRKSEETITPWNFEEVVDKGASAQSFIERMTNFDKNLPNEKVLPKHSLLYEYFTVYNELTKVKYVTEGMRKPAFLSGEQKKAIVDLLFKTNRKVTVKQLKEDYFKKIECFDSVEISGVEDRFNASLGTYHDLLKIIKDKDFLDNEENEDILEDIVLTLTLFEDREMIEERLKTYAHLFDDKVMKQLKRRRYTGWGRLSRKLINGIRDKQSGKTILDFLKSDGFANRNFMQLIHDDSLTFKEDIQKAQVSGQGDSLHEHIANLAGSPAIKKGILQTVKVVDELVKVMGRHKPENIVIEMARENQTTQKGQKNSRERMKRIEEGIKELGSQILKEHPVENTQLQNEKLYLYYLQNGRDMYVDQELDINRLSDYDVDHIVPQSFLKDDSIDNKVLTRSDKARGKSDNVPSEEVVKKMKNYWRQLLNAKLITQRKFDNLTKAERGGLSELDKAGFIKRQLVETRQITKHVAQILDSRMNTKYDENDKLIREVKVITLKSKLVSDFRKDFQFYKVREINNYHHAHDAYLNAVVGTALIKKYPKLESEFVYGDYKVYDVRKMIAKSEQEIGKATAKYFFYSNIMNFFKTEITLANGEIRKRPLIETNGETGEIVWDKGRDFATVRKVLSMPQVNIVKKTEVQTGGFSKESILPKRNSDKLIARKKDWDPKKYGGFDSPTVAYSVLVVAKVEKGKSKKLKSVKELLGITIMERSSFEKNPIDFLEAKGYKEVKKDLIIKLPKYSLFELENGRKRMLASAGELQKGNELALPSKYVNFLYLASHYEKLKGSPEDNEQKQLFVEQHKHYLDEIIEQISEFSKRVILADANLDKVLSAYNKHRDKPIREQAENIIHLFTLTNLGAPAAFKYFDTTIDRKRYTSTKEVLDATLIHQSITGLYETRIDLSQLGGDGGPAPGGGGSSGGIPWLMKKPLQLTTLVPLQEYEERLLKQTMLTGSYKEKLQSLFLKYDALWQHWENQVGHRRIKPHHIATGTVNPRPQKQYPINPKAKASIQTVINDLLKQGVLIQQNSIMNTPVYPVPKPDGKWRMVLDYREVNKTIPLIAAQNQHSAGILSSIFRGKYKTTLDLSNGFWAHSITPESYWLTAFTWLGQQYCWTRLPQGFLNSPALFNADVVDLLKEVPNVQVYVDDIYISHDDPREHLEQLEKVFSLLLNAGYVVSLKKSEIAQHEVEFLGFNITKEGRGLTETFKQKLLNITPPRDLKQLQSILGKLNFARNFIPNFSELVKPLYNIIATAPGKYITWTTDNSQQLQNIISMLNSAENLEERNPEVRLIMKVNTSPSAGYIRFYNEFAKRPIMYLNYVYTKAEVKFTNTEKLLTTIHKGLIKALDLGMGQEILVYSPIVSMTKIQKTPLPERKALPIRWITWMSYLEDPRIQFHYDKTLPELQQVPTVTDDIIAKIKHPSEFSMVFYTDGSAIKHPNVNKSHNAGMGIAQVQFKPEFTVINTWSIPLGDHTAQLAEVAAVEFACKKALKIDGPVLIVTDSFYVAESVNKELPYWQSNGFFNNKKKPLKHVSKWKSIADCIQLKPDIIIIHEKGHQPTASTFHTEGNNLADKLATQGSYVVNAGKRTADGSEFEKRTADGSEFESPKKKAKVE

SEQ ID NO: 7434 - protein, 2174 aa, synthetic construct
MPAAKRVKLDGGDKKYSIGLDIGTNSVGWAVITDEYKVPSKKFKVLGNTDRHSIKKNLIGALLFDSGETAEATRLKRTARRRYTRRKNRICYLQEIFSNEMAKVDDSFFHRLEESFLVEEDKKHERHPIFGNIVDEVAYHEKYPTIYHLRKKLVDSTDKADLRLIYLALAHMIKFRGHFLIEGDLNPDNSDVDKLFIQLVQTYNQLFEENPINASGVDAKAILSARLSKSRRLENLIAQLPGEKKNGLFGNLIALSLGLTPNFKSNFDLAEDAKLQLSKDTYDDDLDNLLAQIGDQYADLFLAAKNLSDAILLSDILRVNTEITKAPLSASMIKRYDEHHQDLTLLKALVRQQLPEKYKEIFFDQSKNGYAGYIDGGASQEEFYKFIKPILEKMDGTEELLVKLNREDLLRKQRTFDNGSIPHQIHLGELHAILRRQEDFYPFLKDNREKIEKILTFRIPYYVGPLARGNSRFAWMTRKSEETITPWNFEEVVDKGASAQSFIERMTNFDKNLPNEKVLPKHSLLYEYFTVYNELTKVKYVTEGMRKPAFLSGEQKKAIVDLLFKTNRKVTVKQLKEDYFKKIECFDSVEISGVEDRFNASLGTYHDLLKIIKDKDFLDNEENEDILEDIVLTLTLFEDREMIEERLKTYAHLFDDKVMKQLKRRRYTGWGRLSRKLINGIRDKQSGKTILDFLKSDGFANRNFMQLIHDDSLTFKEDIQKAQVSGQGDSLHEHIANLAGSPAIKKGILQTVKVVDELVKVMGRHKPENIVIEMARENQTTQKGQKNSRERMKRIEEGIKELGSQILKEHPVENTQLQNEKLYLYYLQNGRDMYVDQELDINRLSDYDVDHIVPQSFLKDDSIDNKVLTRSDKARGKSDNVPSEEVVKKMKNYWRQLLNAKLITQRKFDNLTKAERGGLSELDKAGFIKRQLVETRQITKHVAQILDSRMNTKYDENDKLIREVKVITLKSKLVSDFRKDFQFYKVREINNYHHAHDAYLNAVVGTALIKKYPKLESEFVYGDYKVYDVRKMIAKSEQEIGKATAKYFFYSNIMNFFKTEITLANGEIRKRPLIETNGETGEIVWDKGRDFATVRKVLSMPQVNIVKKTEVQTGGFSKESILPKRNSDKLIARKKDWDPKKYGGFDSPTVAYSVLVVAKVEKGKSKKLKSVKELLGITIMERSSFEKNPIDFLEAKGYKEVKKDLIIKLPKYSLFELENGRKRMLASAGELQKGNELALPSKYVNFLYLASHYEKLKGSPEDNEQKQLFVEQHKHYLDEIIEQISEFSKRVILADANLDKVLSAYNKHRDKPIREQAENIIHLFTLTNLGAPAAFKYFDTTIDRKRYTSTKEVLDATLIHQSITGLYETRIDLSQLGGDGGPAPGGGGSSGGMDPLQLLQPLEAEIKGTKLKAHWNSGATITCVPQAFLEEEVPIKNIWIKTIHGEKEQPVYYLTFKIQGRKVEAEVISSPYDYILVSPSDIPWLMKKPLQLTTLVPLQEYEERLLKQTMLTGSYKEKLQSLFLKYDALWQHWENQVGHRRIKPHHIATGTVNPRPQKQYPINPKAKASIQTVINDLLKQGVLIQQNSIMNTPVYPVPKPDGKWRMVLDYREVNKTIPLIAAQNQHSAGILSSIFRGKYKTTLDLSNGFWAHSITPESYWLTAFTWLGQQYCWTRLPQGFLNSPALFNADVVDLLKEVPNVQVYVDDIYISHDDPREHLEQLEKVFSLLLNAGYVVSLKKSEIAQHEVEFLGFNITKEGRGLTETFKQKLLNITPPRDLKQLQSILGKLNFARNFIPNFSELVKPLYNIIATAPGKYITWTTDNSQQLQNIISMLNSAENLEERNPEVRLIMKVNTSPSAGYIRFYNEFAKRPIMYLNYVYTKAEVKFTNTEKLLTTIHKGLIKALDLGMGQEILVYSPIVSMTKIQKTPLPERKALPIRWITWMSYLEDPRIQFHYDKTLPELQQVPTVTDDIIAKIKHPSEFSMVFYTDGSAIKHPNVNKSHNAGMGIAQVQFKPEFTVINTWSIPLGDHTAQLAEVAAVEFACKKALKIDGPVLIVTDSFYVAESVNKELPYWQSNGFFNNKKKPLKHVSKWKSIADCIQLKPDIIIIHEKGHQPTASTFHTEGNNLADKLATQGSYVVNAGKRTADGSEFEKRTADGSEFESPKKKAKVE

SEQ ID NO: 7435 - protein, 2092 aa, synthetic construct
MPAAKRVKLDGGDKKYSIGLDIGTNSVGWAVITDEYKVPSKKFKVLGNTDRHSIKKNLIGALLFDSGETAEATRLKRTARRRYTRRKNRICYLQEIFSNEMAKVDDSFFHRLEESFLVEEDKKHERHPIFGNIVDEVAYHEKYPTIYHLRKKLVDSTDKADLRLIYLALAHMIKFRGHFLIEGDLNPDNSDVDKLFIQLVQTYNQLFEENPINASGVDAKAILSARLSKSRRLENLIAQLPGEKKNGLFGNLIALSLGLTPNFKSNFDLAEDAKLQLSKDTYDDDLDNLLAQIGDQYADLFLAAKNLSDAILLSDILRVNTEITKAPLSASMIKRYDEHHQDLTLLKALVRQQLPEKYKEIFFDQSKNGYAGYIDGGASQEEFYKFIKPILEKMDGTEELLVKLNREDLLRKQRTFDNGSIPHQIHLGELHAILRRQEDFYPFLKDNREKIEKILTFRIPYYVGPLARGNSRFAWMTRKSEETITPWNFEEVVDKGASAQSFIERMTNFDKNLPNEKVLPKHSLLYEYFTVYNELTKVKYVTEGMRKPAFLSGEQKKAIVDLLFKTNRKVTVKQLKEDYFKKIECFDSVEISGVEDRFNASLGTYHDLLKIIKDKDFLDNEENEDILEDIVLTLTLFEDREMIEERLKTYAHLFDDKVMKQLKRRRYTGWGRLSRKLINGIRDKQSGKTILDFLKSDGFANRNFMQLIHDDSLTFKEDIQKAQVSGQGDSLHEHIANLAGSPAIKKGILQTVKVVDELVKVMGRHKPENIVIEMARENQTTQKGQKNSRERMKRIEEGIKELGSQILKEHPVENTQLQNEKLYLYYLQNGRDMYVDQELDINRLSDYDVDHIVPQSFLKDDSIDNKVLTRSDKARGKSDNVPSEEVVKKMKNYWRQLLNAKLITQRKFDNLTKAERGGLSELDKAGFIKRQLVETRQITKHVAQILDSRMNTKYDENDKLIREVKVITLKSKLVSDFRKDFQFYKVREINNYHHAHDAYLNAVVGTALIKKYPKLESEFVYGDYKVYDVRKMIAKSEQEIGKATAKYFFYSNIMNFFKTEITLANGEIRKRPLIETNGETGEIVWDKGRDFATVRKVLSMPQVNIVKKTEVQTGGFSKESILPKRNSDKLIARKKDWDPKKYGGFDSPTVAYSVLVVAKVEKGKSKKLKSVKELLGITIMERSSFEKNPIDFLEAKGYKEVKKDLIIKLPKYSLFELENGRKRMLASAGELQKGNELALPSKYVNFLYLASHYEKLKGSPEDNEQKQLFVEQHKHYLDEIIEQISEFSKRVILADANLDKVLSAYNKHRDKPIREQAENIIHLFTLTNLGAPAAFKYFDTTIDRKRYTSTKEVLDATLIHQSITGLYETRIDLSQLGGDGGPAPGGGGSSGGVLNLEEEYRLHEKPVPSSIDPSWLQLFPTVWAERAGMGLANQVPPVVVELRSGASPVAVRQYPMSKEAREGIRPHIQRFLDLGVLVPCQSPWNTPLLPVKKPGTNDYRPVQDLREINKRVQDIHPTVPNPYNLLSSLPPSHTWYSVLDLKDAFFCLKLHPNSQPLFAFEWRDPEKGNTGQLTWTRLPQGFKNSPTLFNEALHRDLAPFRALNPQVVLLQYVDDLLVAAPTYRDCKEGTQKLLQELSKLGYRVSAKKAQLCQKEVTYLGYLLKEGKRWLTPARKATVMKIPPPTTPRQVREFLGTAGFCRLWIPGFASLAAPLYPLTKPSIPFIWTEEHQKAFDRIKEALLSAPALALPDLTKPFTLYVDERAGVARGVLTQTLGPWRRPVAYLSKKLDPVASGWPTCLKAVAAVALLLKDADKLTLGQNVTVIASHSLESIVRQPPDRWMTNARMTHYQSLLLNERVSFAPPAVLNPATLLPVESEATPVHRCSEILAEETGTRRDLKDQPLPGVPAWYTDGSSFIAEGKRRAGAAIVDGKRTVWASSLPEGTSAQKAELVALTQALRLAEGKDINIYTDSRYAFATAHIHGAIYKQRGWLTSAGKDIKNKEEILALLEAIHLPKRVAIIHCPGHQKGNDPVATGNRRADEAAKQAALSTRVLAETTKPAGKRTADGSEFEKRTADGSEFESPKKKAKVE

SEQ ID NO: 7436 - protein, 2094 aa, synthetic construct
MPAAKRVKLDGGDKKYSIGLDIGTNSVGWAVITDEYKVPSKKFKVLGNTDRHSIKKNLIGALLFDSGETAEATRLKRTARRRYTRRKNRICYLQEIFSNEMAKVDDSFFHRLEESFLVEEDKKHERHPIFGNIVDEVAYHEKYPTIYHLRKKLVDSTDKADLRLIYLALAHMIKFRGHFLIEGDLNPDNSDVDKLFIQLVQTYNQLFEENPINASGVDAKAILSARLSKSRRLENLIAQLPGEKKNGLFGNLIALSLGLTPNFKSNFDLAEDAKLQLSKDTYDDDLDNLLAQIGDQYADLFLAAKNLSDAILLSDILRVNTEITKAPLSASMIKRYDEHHQDLTLLKALVRQQLPEKYKEIFFDQSKNGYAGYIDGGASQEEFYKFIKPILEKMDGTEELLVKLNREDLLRKQRTFDNGSIPHQIHLGELHAILRRQEDFYPFLKDNREKIEKILTFRIPYYVGPLARGNSRFAWMTRKSEETITPWNFEEVVDKGASAQSFIERMTNFDKNLPNEKVLPKHSLLYEYFTVYNELTKVKYVTEGMRKPAFLSGEQKKAIVDLLFKTNRKVTVKQLKEDYFKKIECFDSVEISGVEDRFNASLGTYHDLLKIIKDKDFLDNEENEDILEDIVLTLTLFEDREMIEERLKTYAHLFDDKVMKQLKRRRYTGWGRLSRKLINGIRDKQSGKTILDFLKSDGFANRNFMQLIHDDSLTFKEDIQKAQVSGQGDSLHEHIANLAGSPAIKKGILQTVKVVDELVKVMGRHKPENIVIEMARENQTTQKGQKNSRERMKRIEEGIKELGSQILKEHPVENTQLQNEKLYLYYLQNGRDMYVDQELDINRLSDYDVDHIVPQSFLKDDSIDNKVLTRSDKARGKSDNVPSEEVVKKMKNYWRQLLNAKLITQRKFDNLTKAERGGLSELDKAGFIKRQLVETRQITKHVAQILDSRMNTKYDENDKLIREVKVITLKSKLVSDFRKDFQFYKVREINNYHHAHDAYLNAVVGTALIKKYPKLESEFVYGDYKVYDVRKMIAKSEQEIGKATAKYFFYSNIMNFFKTEITLANGEIRKRPLIETNGETGEIVWDKGRDFATVRKVLSMPQVNIVKKTEVQTGGFSKESILPKRNSDKLIARKKDWDPKKYGGFDSPTVAYSVLVVAKVEKGKSKKLKSVKELLGITIMERSSFEKNPIDFLEAKGYKEVKKDLIIKLPKYSLFELENGRKRMLASAGELQKGNELALPSKYVNFLYLASHYEKLKGSPEDNEQKQLFVEQHKHYLDEIIEQISEFSKRVILADANLDKVLSAYNKHRDKPIREQAENIIHLFTLTNLGAPAAFKYFDTTIDRKRYTSTKEVLDATLIHQSITGLYETRIDLSQLGGDGGPAPGGGGSSGGTLNIEDEYRLHETSKEPDVPLGSTWLSDFPQAWAETGGMGLAVRQAPLIIPLKATSTPVSIKQYPMSQEARLGIKPHIQRLLDQGILVPCQSPWNTPLLPVKKPGTNDYRPVQDLREVNKRVEDIHPTVPNPYNLLSGLPPSHQWYTVLDLKDAFFCLRLHPTSQPLFAFEWRDPEMGISGQLTWTRLPQGFKNSPTLFNEALHRDLADFRIQHPDLILLQYVDDLLLAATSEQDCQRGTRALLQTLGNLGYRASAKKAQICQKQVKYLGYLLKEGQRWLTEARKETVMGQPTPKTPRQLREFLGTAGFCRLWIPGFAEMAAPLYPLTKPGTLFNWGPDQQKAYQEIKQALLTAPALGLPDLTKPFELFVDEKQGYAKGVLTQKLGPWRRPVAYLSKKLDPVAAGWPPCLRMVAAIAVLTKDAGKLTMGQPLVILAPHAVEALVKQPPDRWLSNARMTHYQAMLLDTDRVQFGPVVALNPATLLPLPEKEAPHDCLEILAETHGTRPDLTDQPIPDADYTWYTDGSSFLQEGQRRAGAAVTTETEVIWARALPAGTSAQRAELIALTQALKMAEGKKLNVYTDSRYAFATAHVHGEIYRRRGWLTSEGREIKNKNEILALLKALFLPKRLSIIHCPGHQKGNSAEARGNRMADQAAREAAMKAVLETSTLLAGKRTADGSEFEKRTADGSEFESPKKKAKVE

SEQ ID NO: 7437 - protein, 2094 aa, synthetic construct
MPAAKRVKLDGGDKKYSIGLDIGTNSVGWAVITDEYKVPSKKFKVLGNTDRHSIKKNLIGALLFDSGETAEATRLKRTARRRYTRRKNRICYLQEIFSNEMAKVDDSFFHRLEESFLVEEDKKHERHPIFGNIVDEVAYHEKYPTIYHLRKKLVDSTDKADLRLIYLALAHMIKFRGHFLIEGDLNPDNSDVDKLFIQLVQTYNQLFEENPINASGVDAKAILSARLSKSRRLENLIAQLPGEKKNGLFGNLIALSLGLTPNFKSNFDLAEDAKLQLSKDTYDDDLDNLLAQIGDQYADLFLAAKNLSDAILLSDILRVNTEITKAPLSASMIKRYDEHHQDLTLLKALVRQQLPEKYKEIFFDQSKNGYAGYIDGGASQEEFYKFIKPILEKMDGTEELLVKLNREDLLRKQRTFDNGSIPHQIHLGELHAILRRQEDFYPFLKDNREKIEKILTFRIPYYVGPLARGNSRFAWMTRKSEETITPWNFEEVVDKGASAQSFIERMTNFDKNLPNEKVLPKHSLLYEYFTVYNELTKVKYVTEGMRKPAFLSGEQKKAIVDLLFKTNRKVTVKQLKEDYFKKIECFDSVEISGVEDRFNASLGTYHDLLKIIKDKDFLDNEENEDILEDIVLTLTLFEDREMIEERLKTYAHLFDDKVMKQLKRRRYTGWGRLSRKLINGIRDKQSGKTILDFLKSDGFANRNFMQLIHDDSLTFKEDIQKAQVSGQGDSLHEHIANLAGSPAIKKGILQTVKVVDELVKVMGRHKPENIVIEMARENQTTQKGQKNSRERMKRIEEGIKELGSQILKEHPVENTQLQNEKLYLYYLQNGRDMYVDQELDINRLSDYDVDHIVPQSFLKDDSIDNKVLTRSDKARGKSDNVPSEEVVKKMKNYWRQLLNAKLITQRKFDNLTKAERGGLSELDKAGFIKRQLVETRQITKHVAQILDSRMNTKYDENDKLIREVKVITLKSKLVSDFRKDFQFYKVREINNYHHAHDAYLNAVVGTALIKKYPKLESEFVYGDYKVYDVRKMIAKSEQEIGKATAKYFFYSNIMNFFKTEITLANGEIRKRPLIETNGETGEIVWDKGRDFATVRKVLSMPQVNIVKKTEVQTGGFSKESILPKRNSDKLIARKKDWDPKKYGGFDSPTVAYSVLVVAKVEKGKSKKLKSVKELLGITIMERSSFEKNPIDFLEAKGYKEVKKDLIIKLPKYSLFELENGRKRMLASAGELQKGNELALPSKYVNFLYLASHYEKLKGSPEDNEQKQLFVEQHKHYLDEIIEQISEFSKRVILADANLDKVLSAYNKHRDKPIREQAENIIHLFTLTNLGAPAAFKYFDTTIDRKRYTSTKEVLDATLIHQSITGLYETRIDLSQLGGDGGPAPGGGGSSGGTLNIEDEYRLHETSKEPDVPLGSTWLSDFPQAWAETGGMGLAVRQAPLIIPLKATSTPVSIKQYPMSQEARLGIKPHIQRLLDQGILVPCQSPWNTPLLPVKKPGTNDYRPVQDLREVNKRVEDIHPTVPNPYNLLSGLPPSHQWYTVLDLKDAFFCLRLHPTSQPLFAFEWRDPEMGISGQLTWTRLPQGFKNSPTLFNEALHRDLADFRIQHPDLILLQYVDDLLLAATSEQDCQRGTRALLQTLGNLGYRASAKKAQICQKQVKYLGYLLKEGQRWLTEARKETVMGQPTPKTPRQLREFLGKAGFCRLFIPGFAEMAAPLYPLTKPGTLFNWGPDQQKAYQEIKQALLTAPALGLPDLTKPFELFVDEKQGYAKGVLTQKLGPWRRPVAYLSKKLDPVAAGWPPCLRMVAAIAVLTKDAGKLTMGQPLVILAPHAVEALVKQPPDRWLSNARMTHYQAMLLDTDRVQFGPVVALNPATLLPLPEKEAPHDCLEILAETHGTRPDLTDQPIPDADYTWYTDGSSFLQEGQRRAGAAVTTETEVIWARALPAGTSAQRAELIALTQALKMAEGKKLNVYTDSRYAFATAHVHGEIYRRRGWLTSEGREIKNKNEILALLKALFLPKRLSIIHCPGHQKGNSAEARGNRMADQAAREAAMKAVLETSTLLAGKRTADGSEFEKRTADGSEFESPKKKAKVE

SEQ ID NO: 7438 - protein, 2096 aa, synthetic construct
MPAAKRVKLDGGDKKYSIGLDIGTNSVGWAVITDEYKVPSKKFKVLGNTDRHSIKKNLIGALLFDSGETAEATRLKRTARRRYTRRKNRICYLQEIFSNEMAKVDDSFFHRLEESFLVEEDKKHERHPIFGNIVDEVAYHEKYPTIYHLRKKLVDSTDKADLRLIYLALAHMIKFRGHFLIEGDLNPDNSDVDKLFIQLVQTYNQLFEENPINASGVDAKAILSARLSKSRRLENLIAQLPGEKKNGLFGNLIALSLGLTPNFKSNFDLAEDAKLQLSKDTYDDDLDNLLAQIGDQYADLFLAAKNLSDAILLSDILRVNTEITKAPLSASMIKRYDEHHQDLTLLKALVRQQLPEKYKEIFFDQSKNGYAGYIDGGASQEEFYKFIKPILEKMDGTEELLVKLNREDLLRKQRTFDNGSIPHQIHLGELHAILRRQEDFYPFLKDNREKIEKILTFRIPYYVGPLARGNSRFAWMTRKSEETITPWNFEEVVDKGASAQSFIERMTNFDKNLPNEKVLPKHSLLYEYFTVYNELTKVKYVTEGMRKPAFLSGEQKKAIVDLLFKTNRKVTVKQLKEDYFKKIECFDSVEISGVEDRFNASLGTYHDLLKIIKDKDFLDNEENEDILEDIVLTLTLFEDREMIEERLKTYAHLFDDKVMKQLKRRRYTGWGRLSRKLINGIRDKQSGKTILDFLKSDGFANRNFMQLIHDDSLTFKEDIQKAQVSGQGDSLHEHIANLAGSPAIKKGILQTVKVVDELVKVMGRHKPENIVIEMARENQTTQKGQKNSRERMKRIEEGIKELGSQILKEHPVENTQLQNEKLYLYYLQNGRDMYVDQELDINRLSDYDVDHIVPQSFLKDDSIDNKVLTRSDKARGKSDNVPSEEVVKKMKNYWRQLLNAKLITQRKFDNLTKAERGGLSELDKAGFIKRQLVETRQITKHVAQILDSRMNTKYDENDKLIREVKVITLKSKLVSDFRKDFQFYKVREINNYHHAHDAYLNAVVGTALIKKYPKLESEFVYGDYKVYDVRKMIAKSEQEIGKATAKYFFYSNIMNFFKTEITLANGEIRKRPLIETNGETGEIVWDKGRDFATVRKVLSMPQVNIVKKTEVQTGGFSKESILPKRNSDKLIARKKDWDPKKYGGFDSPTVAYSVLVVAKVEKGKSKKLKSVKELLGITIMERSSFEKNPIDFLEAKGYKEVKKDLIIKLPKYSLFELENGRKRMLASAGELQKGNELALPSKYVNFLYLASHYEKLKGSPEDNEQKQLFVEQHKHYLDEIIEQISEFSKRVILADANLDKVLSAYNKHRDKPIREQAENIIHLFTLTNLGAPAAFKYFDTTIDRKRYTSTKEVLDATLIHQSITGLYETRIDLSQLGGDGGPAPGSSGGGGGTAPLEEEYRLFLEAPIQNVTLLEQWKREIPKVWAEINPPGLASTQAPIHVQLLSTALPVRVRQYPITLEAKRSLRETIRKFRAAGILRPVHSPWNTPLLPVRKSGTSEYRMVQDLREVNKRVETIHPTVPNPYTLLSLLPPDRIWYSVLDLKDAFFCIPLAPESQLIFAFEWADAEEGESGQLTWTRLPQGFKNSPTLFNEALNRDLQGFRLDHPSVSLLQYVDDLLIAADTQAACLSATRDLLMTLAELGYRVSGKKAQLCQEEVTYLGFKIHKGSRSLSNSRTQAILQIPVPKTKRQVREFLGKIGYCRLFIPGFAELAQPLYAATRPGNDPLVWGEKEEEAFQSLKLALTQPPALALPSLDKPFQLFVEETSGAAKGVLTQALGPWKRPVAYLSKRLDPVAAGWPRCLRAIAAAALLTREASKLTFGQDIEITSSHNLESLLRSPPDKWLTNARITQYQVLLLDPPRVRFKQTAALNPATLLPETDDTLPIHHCLDTLDSLTSTRPDLTDQPLAQAEATLFTDGSSYIRDGKRYAGAAVVTLDSVIWAEPLPIGTSAQKAELIALTKALEWSKDKSVNIYTDSRYAFATLHVHGMIYRERGWLTAGGKAIKNAPEILALLTAVWLPKRVAVMHCKGHQKDDAPTSTGNRRADEVAREVAIRPLSTQATISAGKRTADGSEFEKRTADGSEFESPKKKAKVE

SEQ ID NO: 7439 - protein, 2171 aa, synthetic construct
MPAAKRVKLDGGDKKYSIGLDIGTNSVGWAVITDEYKVPSKKFKVLGNTDRHSIKKNLIGALLFDSGETAEATRLKRTARRRYTRRKNRICYLQEIFSNEMAKVDDSFFHRLEESFLVEEDKKHERHPIFGNIVDEVAYHEKYPTIYHLRKKLVDSTDKADLRLIYLALAHMIKFRGHFLIEGDLNPDNSDVDKLFIQLVQTYNQLFEENPINASGVDAKAILSARLSKSRRLENLIAQLPGEKKNGLFGNLIALSLGLTPNFKSNFDLAEDAKLQLSKDTYDDDLDNLLAQIGDQYADLFLAAKNLSDAILLSDILRVNTEITKAPLSASMIKRYDEHHQDLTLLKALVRQQLPEKYKEIFFDQSKNGYAGYIDGGASQEEFYKFIKPILEKMDGTEELLVKLNREDLLRKQRTFDNGSIPHQIHLGELHAILRRQEDFYPFLKDNREKIEKILTFRIPYYVGPLARGNSRFAWMTRKSEETITPWNFEEVVDKGASAQSFIERMTNFDKNLPNEKVLPKHSLLYEYFTVYNELTKVKYVTEGMRKPAFLSGEQKKAIVDLLFKTNRKVTVKQLKEDYFKKIECFDSVEISGVEDRFNASLGTYHDLLKIIKDKDFLDNEENEDILEDIVLTLTLFEDREMIEERLKTYAHLFDDKVMKQLKRRRYTGWGRLSRKLINGIRDKQSGKTILDFLKSDGFANRNFMQLIHDDSLTFKEDIQKAQVSGQGDSLHEHIANLAGSPAIKKGILQTVKVVDELVKVMGRHKPENIVIEMARENQTTQKGQKNSRERMKRIEEGIKELGSQILKEHPVENTQLQNEKLYLYYLQNGRDMYVDQELDINRLSDYDVDHIVPQSFLKDDSIDNKVLTRSDKARGKSDNVPSEEVVKKMKNYWRQLLNAKLITQRKFDNLTKAERGGLSELDKAGFIKRQLVETRQITKHVAQILDSRMNTKYDENDKLIREVKVITLKSKLVSDFRKDFQFYKVREINNYHHAHDAYLNAVVGTALIKKYPKLESEFVYGDYKVYDVRKMIAKSEQEIGKATAKYFFYSNIMNFFKTEITLANGEIRKRPLIETNGETGEIVWDKGRDFATVRKVLSMPQVNIVKKTEVQTGGFSKESILPKRNSDKLIARKKDWDPKKYGGFDSPTVAYSVLVVAKVEKGKSKKLKSVKELLGITIMERSSFEKNPIDFLEAKGYKEVKKDLIIKLPKYSLFELENGRKRMLASAGELQKGNELALPSKYVNFLYLASHYEKLKGSPEDNEQKQLFVEQHKHYLDEIIEQISEFSKRVILADANLDKVLSAYNKHRDKPIREQAENIIHLFTLTNLGAPAAFKYFDTTIDRKRYTSTKEVLDATLIHQSITGLYETRIDLSQLGGDGGPAPGSSGGGGGMDLLKPLTVERKGVKIKGYWNSQADITCVPKDLLQGEEPVRQQNVTTIHGTQEGDVYYVNLKIDGRRINTEVIGTTLDYAIITPGDVPWILKKPLELTIKLDLEEQQGTLLNNSILSKKGKEELKQLFEKYSALWQSWENQVGHRRIRPHKIATGTVKPTPQKQYHINPKAKPDIQIVINDLLKQGVLIQKESTMNTPVYPVPKPNGRWRMVLDYRAVNKVTPLIAVQNQHSYGILGSLFKGRYKTTIDLSNGFWAHPIVPEDYWITAFTWQGKQYCWTVLPQGFLNSPGLFTGDVVDLLQGIPNVEVYVDDVYISHDSEKEHLEYLDILFNRLKEAGYIISLKKSNIANSIVDFLGFQITNEGRGLTDTFKEKLENITAPTTLKQLQSILGLLNFARNFIPDFTELIAPLYALIPKSTKNYVPWQIEHSTTLETLITKLNGAEYLQGRKGDKTLIMKVNASYTTGYIRYYNEGEKKPISYVSIVFSKTELKFTELEKLLTTVHKGLLKALDLSMGQNIHVYSPIVSMQNIQKTPQTAKKALASRWLSWLSYLEDPRIRFFYDPQMPALKDLPAVDTGKDNKKHPSNFQHIFYTDGSAITSPTKEGHLNAGMGIVYFINKDGNLQKQQEWSISLGNHTAQFAEIAAFEFALKKCLPLGGNILVVTDSNYVAKAYNEELDVWASNGFVNNRKKPLKHISKWKSVADLKRLRPDVVVTHEPGHQKLDSSPHAYGNNLADQLATQASFKVHAGKRTADGSEFEKRTADGSEFESPKKKAKVE

SEQ ID NO: 7440 - protein, 2174 aa, synthetic construct
MPAAKRVKLDGGDKKYSIGLDIGTNSVGWAVITDEYKVPSKKFKVLGNTDRHSIKKNLIGALLFDSGETAEATRLKRTARRRYTRRKNRICYLQEIFSNEMAKVDDSFFHRLEESFLVEEDKKHERHPIFGNIVDEVAYHEKYPTIYHLRKKLVDSTDKADLRLIYLALAHMIKFRGHFLIEGDLNPDNSDVDKLFIQLVQTYNQLFEENPINASGVDAKAILSARLSKSRRLENLIAQLPGEKKNGLFGNLIALSLGLTPNFKSNFDLAEDAKLQLSKDTYDDDLDNLLAQIGDQYADLFLAAKNLSDAILLSDILRVNTEITKAPLSASMIKRYDEHHQDLTLLKALVRQQLPEKYKEIFFDQSKNGYAGYIDGGASQEEFYKFIKPILEKMDGTEELLVKLNREDLLRKQRTFDNGSIPHQIHLGELHAILRRQEDFYPFLKDNREKIEKILTFRIPYYVGPLARGNSRFAWMTRKSEETITPWNFEEVVDKGASAQSFIERMTNFDKNLPNEKVLPKHSLLYEYFTVYNELTKVKYVTEGMRKPAFLSGEQKKAIVDLLFKTNRKVTVKQLKEDYFKKIECFDSVEISGVEDRFNASLGTYHDLLKIIKDKDFLDNEENEDILEDIVLTLTLFEDREMIEERLKTYAHLFDDKVMKQLKRRRYTGWGRLSRKLINGIRDKQSGKTILDFLKSDGFANRNFMQLIHDDSLTFKEDIQKAQVSGQGDSLHEHIANLAGSPAIKKGILQTVKVVDELVKVMGRHKPENIVIEMARENQTTQKGQKNSRERMKRIEEGIKELGSQILKEHPVENTQLQNEKLYLYYLQNGRDMYVDQELDINRLSDYDVDHIVPQSFLKDDSIDNKVLTRSDKARGKSDNVPSEEVVKKMKNYWRQLLNAKLITQRKFDNLTKAERGGLSELDKAGFIKRQLVETRQITKHVAQILDSRMNTKYDENDKLIREVKVITLKSKLVSDFRKDFQFYKVREINNYHHAHDAYLNAVVGTALIKKYPKLESEFVYGDYKVYDVRKMIAKSEQEIGKATAKYFFYSNIMNFFKTEITLANGEIRKRPLIETNGETGEIVWDKGRDFATVRKVLSMPQVNIVKKTEVQTGGFSKESILPKRNSDKLIARKKDWDPKKYGGFDSPTVAYSVLVVAKVEKGKSKKLKSVKELLGITIMERSSFEKNPIDFLEAKGYKEVKKDLIIKLPKYSLFELENGRKRMLASAGELQKGNELALPSKYVNFLYLASHYEKLKGSPEDNEQKQLFVEQHKHYLDEIIEQISEFSKRVILADANLDKVLSAYNKHRDKPIREQAENIIHLFTLTNLGAPAAFKYFDTTIDRKRYTSTKEVLDATLIHQSITGLYETRIDLSQLGGDGGPAPGSSGGGGGMNPLQLLQPLPAEIKGTKLLAHWNSGATITCIPESFLEDEQPIKKTLIKTIHGEKQQNVYYVTFKVKGRKVEAEVIASPYEYILLSPTDVPWLTQQPLQLTILVPLQEYQEKILSKTALPEDQKQQLKTLFVKYDNLWQHWENQVGHRKIRPHNIATGDYPPRPQKQYPINPKAKPSIQIVIDDLLKQGVLTPQNSTMNTPVYPVPKPDGRWRMVLDYREVNKTIPLTAAQNQHSAGILATIVRQKYKTTLDLANGFWAHPITPESYWLTAFTWQGKQYCWTRLPQGFLNSPALFNADVVDLLKEIPNVQVYVDDIYLSHDDPKEHVQQLEKVFQILLQAGYVVSLKKSEIGQKTVEFLGFNITKEGRGLTDTFKTKLLNITPPKDLKQLQSILGKLNFARNFIPNFAELVQPLYNLIAPAKGKYIEWSEENTKQLNMVIEALNTASNLEERLPEQRLVIKVNTSPSAGYVRYYNETGKKPIMYLNYVFSKAELKFSMLEKLLTTMHKALIKAMDLAMGQEILVYSPIVSMTKIQKTPLPERKALPIRWITWMTYLEDPRIQFHYDKTLPELKHIPDVYTSSQSPVKHPSQYEGVFYTDGSAIKSPDPTKSNNAGMGIVHATYKPEYQVLNQWSIPLGNHTAQMAEIAAVEFACKKALKIPGPVLVITDSFYVAESANKELPYWKSNGFVNNKKKPLKHISKWKSIAECLSMKPDITIQHEKGISLQIPVFILKGNALADKLATQGSYVVNAGKRTADGSEFEKRTADGSEFESPKKKAKVE

SEQ ID NO: 7441 - protein, 2125 aa, synthetic construct
MPAAKRVKLDGGDKKYSIGLDIGTNSVGWAVITDEYKVPSKKFKVLGNTDRHSIKKNLIGALLFDSGETAEATRLKRTARRRYTRRKNRICYLQEIFSNEMAKVDDSFFHRLEESFLVEEDKKHERHPIFGNIVDEVAYHEKYPTIYHLRKKLVDSTDKADLRLIYLALAHMIKFRGHFLIEGDLNPDNSDVDKLFIQLVQTYNQLFEENPINASGVDAKAILSARLSKSRRLENLIAQLPGEKKNGLFGNLIALSLGLTPNFKSNFDLAEDAKLQLSKDTYDDDLDNLLAQIGDQYADLFLAAKNLSDAILLSDILRVNTEITKAPLSASMIKRYDEHHQDLTLLKALVRQQLPEKYKEIFFDQSKNGYAGYIDGGASQEEFYKFIKPILEKMDGTEELLVKLNREDLLRKQRTFDNGSIPHQIHLGELHAILRRQEDFYPFLKDNREKIEKILTFRIPYYVGPLARGNSRFAWMTRKSEETITPWNFEEVVDKGASAQSFIERMTNFDKNLPNEKVLPKHSLLYEYFTVYNELTKVKYVTEGMRKPAFLSGEQKKAIVDLLFKTNRKVTVKQLKEDYFKKIECFDSVEISGVEDRFNASLGTYHDLLKIIKDKDFLDNEENEDILEDIVLTLTLFEDREMIEERLKTYAHLFDDKVMKQLKRRRYTGWGRLSRKLINGIRDKQSGKTILDFLKSDGFANRNFMQLIHDDSLTFKEDIQKAQVSGQGDSLHEHIANLAGSPAIKKGILQTVKVVDELVKVMGRHKPENIVIEMARENQTTQKGQKNSRERMKRIEEGIKELGSQILKEHPVENTQLQNEKLYLYYLQNGRDMYVDQELDINRLSDYDVDHIVPQSFLKDDSIDNKVLTRSDKARGKSDNVPSEEVVKKMKNYWRQLLNAKLITQRKFDNLTKAERGGLSELDKAGFIKRQLVETRQITKHVAQILDSRMNTKYDENDKLIREVKVITLKSKLVSDFRKDFQFYKVREINNYHHAHDAYLNAVVGTALIKKYPKLESEFVYGDYKVYDVRKMIAKSEQEIGKATAKYFFYSNIMNFFKTEITLANGEIRKRPLIETNGETGEIVWDKGRDFATVRKVLSMPQVNIVKKTEVQTGGFSKESILPKRNSDKLIARKKDWDPKKYGGFDSPTVAYSVLVVAKVEKGKSKKLKSVKELLGITIMERSSFEKNPIDFLEAKGYKEVKKDLIIKLPKYSLFELENGRKRMLASAGELQKGNELALPSKYVNFLYLASHYEKLKGSPEDNEQKQLFVEQHKHYLDEIIEQISEFSKRVILADANLDKVLSAYNKHRDKPIREQAENIIHLFTLTNLGAPAAFKYFDTTIDRKRYTSTKEVLDATLIHQSITGLYETRIDLSQLGGDGGPAPGSSGGGGGLLGRDLLTKLKAQIQFSTEGPQVTWEDRPAMCLVLNLEEEYRLHEKPVPPSIDPSWLQLFPMVWAEKAGMGLANQVPPVVVELKSDASPVAVRQYPMSKEAREGIRPHIQRFLDLGILVPCQSPWNTPLLPVKKPGTNDYRPVQDLREVNKRVQDIHPTVPNPYNLLSSLPPSHTWYSVLDLKDAFFCLKLHPNSQPLFAFEWRDPEKGNTGQLTWTRLPQGFKNSPTLFNEALHRDLASFRALNPQVVMLQYVDDLLVAAPTYRDCKEGTRRLLQELSKLGYRVSAKKAQLCREEVTYLGYLLKGGKRWLTPARKATVMKIPTPTTPRQVREFLGTAGFCRLWIPGFASLAAPLYPLTRPKVPFTWTEAHQEAFGRIKEALLSAPALALPDLTKPFALYVDEKEGVARGVLTQTLGPWRRPVAYLSKKLDPVASGWPTCLKAIAAVALLLKDADKLTLGQNVLVIAPHNLESIVRQPPDRWMTNARMTHYQSLLLNERVSFAPPAILNPATLLPVESDDTPIHICSEILAEETGTRPDLRDQPLPGVPAWYTDGSSFIMDGRRQAGAAIVDNKRTVWASNLPEGTSAQKAELIALTQALRLAEGKSINIYTDSRYAFATAHVHGAIYKQRGWLTSAGKDIKNKEEILALLEAIHLPKRVAIIHCPGHQRGTDPVATGNRKADEAAKQAAQSTRILTETTKNAGKRTADGSEFEKRTADGSEFESPKKKAKVE

SEQ ID NO: 7442 - protein, 2094 aa, synthetic construct
MPAAKRVKLDGGDKKYSIGLDIGTNSVGWAVITDEYKVPSKKFKVLGNTDRHSIKKNLIGALLFDSGETAEATRLKRTARRRYTRRKNRICYLQEIFSNEMAKVDDSFFHRLEESFLVEEDKKHERHPIFGNIVDEVAYHEKYPTIYHLRKKLVDSTDKADLRLIYLALAHMIKFRGHFLIEGDLNPDNSDVDKLFIQLVQTYNQLFEENPINASGVDAKAILSARLSKSRRLENLIAQLPGEKKNGLFGNLIALSLGLTPNFKSNFDLAEDAKLQLSKDTYDDDLDNLLAQIGDQYADLFLAAKNLSDAILLSDILRVNTEITKAPLSASMIKRYDEHHQDLTLLKALVRQQLPEKYKEIFFDQSKNGYAGYIDGGASQEEFYKFIKPILEKMDGTEELLVKLNREDLLRKQRTFDNGSIPHQIHLGELHAILRRQEDFYPFLKDNREKIEKILTFRIPYYVGPLARGNSRFAWMTRKSEETITPWNFEEVVDKGASAQSFIERMTNFDKNLPNEKVLPKHSLLYEYFTVYNELTKVKYVTEGMRKPAFLSGEQKKAIVDLLFKTNRKVTVKQLKEDYFKKIECFDSVEISGVEDRFNASLGTYHDLLKIIKDKDFLDNEENEDILEDIVLTLTLFEDREMIEERLKTYAHLFDDKVMKQLKRRRYTGWGRLSRKLINGIRDKQSGKTILDFLKSDGFANRNFMQLIHDDSLTFKEDIQKAQVSGQGDSLHEHIANLAGSPAIKKGILQTVKVVDELVKVMGRHKPENIVIEMARENQTTQKGQKNSRERMKRIEEGIKELGSQILKEHPVENTQLQNEKLYLYYLQNGRDMYVDQELDINRLSDYDVDHIVPQSFLKDDSIDNKVLTRSDKARGKSDNVPSEEVVKKMKNYWRQLLNAKLITQRKFDNLTKAERGGLSELDKAGFIKRQLVETRQITKHVAQILDSRMNTKYDENDKLIREVKVITLKSKLVSDFRKDFQFYKVREINNYHHAHDAYLNAVVGTALIKKYPKLESEFVYGDYKVYDVRKMIAKSEQEIGKATAKYFFYSNIMNFFKTEITLANGEIRKRPLIETNGETGEIVWDKGRDFATVRKVLSMPQVNIVKKTEVQTGGFSKESILPKRNSDKLIARKKDWDPKKYGGFDSPTVAYSVLVVAKVEKGKSKKLKSVKELLGITIMERSSFEKNPIDFLEAKGYKEVKKDLIIKLPKYSLFELENGRKRMLASAGELQKGNELALPSKYVNFLYLASHYEKLKGSPEDNEQKQLFVEQHKHYLDEIIEQISEFSKRVILADANLDKVLSAYNKHRDKPIREQAENIIHLFTLTNLGAPAAFKYFDTTIDRKRYTSTKEVLDATLIHQSITGLYETRIDLSQLGGDGGPAPGSSGGGGGTLNLEDEYRLYETSAEPEVSPGSTWLSDFPQAWAETGGMGLAVRQAPLIIPLKATSTPVSIKQYPMSQEAKLGIKPHIQRLLDQGILVPCQSPWNTPLLPVKKPGTNDYRPVQDLREVNKRVEDIHPTVPNPYNLLSGLPPSHRWYTVLDLKDAFFCLRLHPTSQPLFAFEWRDPGMGISGQLTWTRLPQGFKNSPTLFNEALHRDLADFRIQHPDLILLQYVDDILLAATSELDCQQGTRALLLTLGNLGYRASAKKAQLCQKQVKYLGYLLKEGQRWLTEARKETVMGQPTPKTPRQLREFLGTAGFCRLWIPGFAEMAAPLYPLTKPGTLFNWGPDQQKAYQEIKQALLTAPALGLPDLTKPFELFVDEKQGYAKGVLTQKLGPWRRPVAYLSKKLDPVAAGWPPCLRMVAAIAVLRKDAGKLTMGQPLVILAPHAVEALVKQPPDRWLSNARMTHYQAMLLDTDRVQFGPVVALNPATLLPLPEEGAPHDCLEILAETHGTRPDLTDQPIPDADHTWYTDGSSFLQEGQRKAGAAVTTETEVIWARALPAGTSAQRAELIALTQALKMAEGKRLNVYTDSRYAFATAHIHGEIYRRRGWLTSEGREIKNKSEILALLKALFLPKRLSIIHCLGHQKGDSAEARGNRLADQAAREAAIKTPPDTSTLLAGKRTADGSEFEKRTADGSEFESPKKKAKVE

SEQ ID NO: 7443 - protein, 2094 aa, synthetic construct; identical to SEQ ID NO: 4533

SEQ ID NO: 7444 - protein, 2094 aa, synthetic construct
MPAAKRVKLDGGDKKYSIGLDIGTNSVGWAVITDEYKVPSKKFKVLGNTDRHSIKKNLIGALLFDSGETAEATRLKRTARRRYTRRKNRICYLQEIFSNEMAKVDDSFFHRLEESFLVEEDKKHERHPIFGNIVDEVAYHEKYPTIYHLRKKLVDSTDKADLRLIYLALAHMIKFRGHFLIEGDLNPDNSDVDKLFIQLVQTYNQLFEENPINASGVDAKAILSARLSKSRRLENLIAQLPGEKKNGLFGNLIALSLGLTPNFKSNFDLAEDAKLQLSKDTYDDDLDNLLAQIGDQYADLFLAAKNLSDAILLSDILRVNTEITKAPLSASMIKRYDEHHQDLTLLKALVRQQLPEKYKEIFFDQSKNGYAGYIDGGASQEEFYKFIKPILEKMDGTEELLVKLNREDLLRKQRTFDNGSIPHQIHLGELHAILRRQEDFYPFLKDNREKIEKILTFRIPYYVGPLARGNSRFAWMTRKSEETITPWNFEEVVDKGASAQSFIERMTNFDKNLPNEKVLPKHSLLYEYFTVYNELTKVKYVTEGMRKPAFLSGEQKKAIVDLLFKTNRKVTVKQLKEDYFKKIECFDSVEISGVEDRFNASLGTYHDLLKIIKDKDFLDNEENEDILEDIVLTLTLFEDREMIEERLKTYAHLFDDKVMKQLKRRRYTGWGRLSRKLINGIRDKQSGKTILDFLKSDGFANRNFMQLIHDDSLTFKEDIQKAQVSGQGDSLHEHIANLAGSPAIKKGILQTVKVVDELVKVMGRHKPENIVIEMARENQTTQKGQKNSRERMKRIEEGIKELGSQILKEHPVENTQLQNEKLYLYYLQNGRDMYVDQELDINRLSDYDVDHIVPQSFLKDDSIDNKVLTRSDKARGKSDNVPSEEVVKKMKNYWRQLLNAKLITQRKFDNLTKAERGGLSELDKAGFIKRQLVETRQITKHVAQILDSRMNTKYDENDKLIREVKVITLKSKLVSDFRKDFQFYKVREINNYHHAHDAYLNAVVGTALIKKYPKLESEFVYGDYKVYDVRKMIAKSEQEIGKATAKYFFYSNIMNFFKTEITLANGEIRKRPLIETNGETGEIVWDKGRDFATVRKVLSMPQVNIVKKTEVQTGGFSKESILPKRNSDKLIARKKDWDPKKYGGFDSPTVAYSVLVVAKVEKGKSKKLKSVKELLGITIMERSSFEKNPIDFLEAKGYKEVKKDLIIKLPKYSLFELENGRKRMLASAGELQKGNELALPSKYVNFLYLASHYEKLKGSPEDNEQKQLFVEQHKHYLDEIIEQISEFSKRVILADANLDKVLSAYNKHRDKPIREQAENIIHLFTLTNLGAPAAFKYFDTTIDRKRYTSTKEVLDATLIHQSITGLYETRIDLSQLGGDGGPAPGSSGGGGGTLNIEDEHRLHETSKEPDVSLGSTWLSDFPQAWAETGGMGLAVRQAPLIIPLKATSTPVSIKQYPMSQEARLGIKPHIQRLLDQGILVPCQSPWNTPLLPVKKPGTNDYRPVQDLREVNKRVEDIHPTVPNPYNLLSGLPPSHQWYTVLDLKDAFFCLRLHPTSQPLFAFEWRDPEMGISGQLTWTRLPQGFKNSPTLFNEALHRDLADFRIQHPDLILLQYVDDLLLAATSELDCQQGTRALLQTLGNLGYRASAKKAQICQKQVKYLGYLLKEGQRWLTEARKETVMGQPTPKTPRQLREFLGTAGFCRLWIPGFAEMAAPLYPLTKPGTLFNWGPDQQKAYQEIKQALLTAPALGLPDLTKPFELFVDEKQGYAKGVLTQKLGPWRRPVAYLSKKLDPVAAGWPPCLRMVAAIAVLTKDAGKLTMGQPLVILAPHAVEALVKQPPDRWLSNARMTHYQALLLDTDRVQFGPVVALNPATLLPLPEEGLQHNCLDILAEAHGTRPDLTDQPLPDADHTWYTDGSSLLQEGQRKAGAAVTTETEVIWAKALPAGTSAQRAELIALTQALKMAEGKKLNVYTDSRYAFATAHIHGEIYRRRGWLTSEGKEIKNKDEILALLKALFLPKRLSIIHCPGHQKGHSAEARGNRMADQAARKAAITETPDTSTLLAGKRTADGSEFEKRTADGSEFESPKKKAKVE

SEQ ID NO: 7445 - protein, 2094 aa, synthetic construct; identical to SEQ ID NO: 7444

SEQ ID NO: 7446 - protein, 2174 aa, synthetic construct
MPAAKRVKLDGGDKKYSIGLDIGTNSVGWAVITDEYKVPSKKFKVLGNTDRHSIKKNLIGALLFDSGETAEATRLKRTARRRYTRRKNRICYLQEIFSNEMAKVDDSFFHRLEESFLVEEDKKHERHPIFGNIVDEVAYHEKYPTIYHLRKKLVDSTDKADLRLIYLALAHMIKFRGHFLIEGDLNPDNSDVDKLFIQLVQTYNQLFEENPINASGVDAKAILSARLSKSRRLENLIAQLPGEKKNGLFGNLIALSLGLTPNFKSNFDLAEDAKLQLSKDTYDDDLDNLLAQIGDQYADLFLAAKNLSDAILLSDILRVNTEITKAPLSASMIKRYDEHHQDLTLLKALVRQQLPEKYKEIFFDQSKNGYAGYIDGGASQEEFYKFIKPILEKMDGTEELLVKLNREDLLRKQRTFDNGSIPHQIHLGELHAILRRQEDFYPFLKDNREKIEKILTFRIPYYVGPLARGNSRFAWMTRKSEETITPWNFEEVVDKGASAQSFIERMTNFDKNLPNEKVLPKHSLLYEYFTVYNELTKVKYVTEGMRKPAFLSGEQKKAIVDLLFKTNRKVTVKQLKEDYFKKIECFDSVEISGVEDRFNASLGTYHDLLKIIKDKDFLDNEENEDILEDIVLTLTLFEDREMIEERLKTYAHLFDDKVMKQLKRRRYTGWGRLSRKLINGIRDKQSGKTILDFLKSDGFANRNFMQLIHDDSLTFKEDIQKAQVSGQGDSLHEHIANLAGSPAIKKGILQTVKVVDELVKVMGRHKPENIVIEMARENQTTQKGQKNSRERMKRIEEGIKELGSQILKEHPVENTQLQNEKLYLYYLQNGRDMYVDQELDINRLSDYDVDHIVPQSFLKDDSIDNKVLTRSDKARGKSDNVPSEEVVKKMKNYWRQLLNAKLITQRKFDNLTKAERGGLSELDKAGFIKRQLVETRQITKHVAQILDSRMNTKYDENDKLIREVKVITLKSKLVSDFRKDFQFYKVREINNYHHAHDAYLNAVVGTALIKKYPKLESEFVYGDYKVYDVRKMIAKSEQEIGKATAKYFFYSNIMNFFKTEITLANGEIRKRPLIETNGETGEIVWDKGRDFATVRKVLSMPQVNIVKKTEVQTGGFSKESILPKRNSDKLIARKKDWDPKKYGGFDSPTVAYSVLVVAKVEKGKSKKLKSVKELLGITIMERSSFEKNPIDFLEAKGYKEVKKDLIIKLPKYSLFELENGRKRMLASAGELQKGNELALPSKYVNFLYLASHYEKLKGSPEDNEQKQLFVEQHKHYLDEIIEQISEFSKRVILADANLDKVLSAYNKHRDKPIREQAENIIHLFTLTNLGAPAAFKYFDTTIDRKRYTSTKEVLDATLIHQSITGLYETRIDLSQLGGDGGPAPGSSGGGGGMDPLQLLQPLEAEIKGTKLKAHWNSGATITCVPQAFLEEEVPIKNIWIKTIHGEKEQPVYYLTFKIQGRKVEAEVISSPYDYILVSPSDIPWLMKKPLQLTTLVPLQEYEERLLKQTMLTGSYKEKLQSLFLKYDALWQHWENQVGHRRIKPHHIATGTVNPRPQKQYPINPKAKASIQTVINDLLKQGVLIQQNSIMNTPVYPVPKPDGKWRMVLDYREVNKTIPLIAAQNQHSAGILSSIFRGKYKTTLDLSNGFWAHSITPESYWLTAFTWLGQQYCWTRLPQGFLNSPALFNADVVDLLKEVPNVQVYVDDIYISHDDPREHLEQLEKVFSLLLNAGYVVSLKKSEIAQHEVEFLGFNITKEGRGLTETFKQKLLNITPPRDLKQLQSILGKLNFARNFIPNFSELVKPLYNIIATAPGKYITWTTDNSQQLQNIISMLNSAENLEERNPEVRLIMKVNTSPSAGYIRFYNEFAKRPIMYLNYVYTKAEVKFTNTEKLLTTIHKGLIKALDLGMGQEILVYSPIVSMTKIQKTPLPERKALPIRWITWMSYLEDPRIQFHYDKTLPELQQVPTVTDDIIAKIKHPSEFSMVFYTDGSAIKHPNVNKSHNAGMGIAQVQFKPEFTVINTWSIPLGDHTAQLAEVAAVEFACKKALKIDGPVLIVTDSFYVAESVNKELPYWQSNGFFNNKKKPLKHVSKWKSIADCIQLKPDIIIIHEKGHQPTASTFHTEGNNLADKLATQGSYVVNAGKRTADGSEFEKRTADGSEFESPKKKAKVE

SEQ ID NO: 7447 - protein, 2094 aa, synthetic construct
MPAAKRVKLDGGDKKYSIGLDIGTNSVGWAVITDEYKVPSKKFKVLGNTDRHSIKKNLIGALLFDSGETAEATRLKRTARRRYTRRKNRICYLQEIFSNEMAKVDDSFFHRLEESFLVEEDKKHERHPIFGNIVDEVAYHEKYPTIYHLRKKLVDSTDKADLRLIYLALAHMIKFRGHFLIEGDLNPDNSDVDKLFIQLVQTYNQLFEENPINASGVDAKAILSARLSKSRRLENLIAQLPGEKKNGLFGNLIALSLGLTPNFKSNFDLAEDAKLQLSKDTYDDDLDNLLAQIGDQYADLFLAAKNLSDAILLSDILRVNTEITKAPLSASMIKRYDEHHQDLTLLKALVRQQLPEKYKEIFFDQSKNGYAGYIDGGASQEEFYKFIKPILEKMDGTEELLVKLNREDLLRKQRTFDNGSIPHQIHLGELHAILRRQEDFYPFLKDNREKIEKILTFRIPYYVGPLARGNSRFAWMTRKSEETITPWNFEEVVDKGASAQSFIERMTNFDKNLPNEKVLPKHSLLYEYFTVYNELTKVKYVTEGMRKPAFLSGEQKKAIVDLLFKTNRKVTVKQLKEDYFKKIECFDSVEISGVEDRFNASLGTYHDLLKIIKDKDFLDNEENEDILEDIVLTLTLFEDREMIEERLKTYAHLFDDKVMKQLKRRRYTGWGRLSRKLINGIRDKQSGKTILDFLKSDGFANRNFMQLIHDDSLTFKEDIQKAQVSGQGDSLHEHIANLAGSPAIKKGILQTVKVVDELVKVMGRHKPENIVIEMARENQTTQKGQKNSRERMKRIEEGIKELGSQILKEHPVENTQLQNEKLYLYYLQNGRDMYVDQELDINRLSDYDVDHIVPQSFLKDDSIDNKVLTRSDKARGKSDNVPSEEVVKKMKNYWRQLLNAKLITQRKFDNLTKAERGGLSELDKAGFIKRQLVETRQITKHVAQILDSRMNTKYDENDKLIREVKVITLKSKLVSDFRKDFQFYKVREINNYHHAHDAYLNAVVGTALIKKYPKLESEFVYGDYKVYDVRKMIAKSEQEIGKATAKYFFYSNIMNFFKTEITLANGEIRKRPLIETNGETGEIVWDKGRDFATVRKVLSMPQVNIVKKTEVQTGGFSKESILPKRNSDKLIARKKDWDPKKYGGFDSPTVAYSVLVVAKVEKGKSKKLKSVKELLGITIMERSSFEKNPIDFLEAKGYKEVKKDLIIKLPKYSLFELENGRKRMLASAGELQKGNELALPSKYVNFLYLASHYEKLKGSPEDNEQKQLFVEQHKHYLDEIIEQISEFSKRVILADANLDKVLSAYNKHRDKPIREQAENIIHLFTLTNLGAPAAFKYFDTTIDRKRYTSTKEVLDATLIHQSITGLYETRIDLSQLGGDGGPAPGSSGGGGGTLNIEDEYRLHETSKEPDVPLGSTWLSDFPQAWAETGGMGLAVRQAPLIIPLKATSTPVSIKQYPMSQEARLGIKPHIQRLLDQGILVPCQSPWNTPLLPVKKPGTNDYRPVQDLREVNKRVEDIHPTVPNPYNLLSGLPPSHQWYTVLDLKDAFFCLRLHPTSQPLFAFEWRDPEMGISGQLTWTRLPQGFKNSPTLFNEALHRDLADFRIQHPDLILLQYVDDLLLAATSEQDCQRGTRALLQTLGNLGYRASAKKAQICQKQVKYLGYLLKEGQRWLTEARKETVMGQPTPKTPRQLREFLGTAGFCRLWIPGFAEMAAPLYPLTKPGTLFNWGPDQQKAYQEIKQALLTAPALGLPDLTKPFELFVDEKQGYAKGVLTQKLGPWRRPVAYLSKKLDPVAAGWPPCLRMVAAIAVLTKDAGKLTMGQPLVILAPHAVEALVKQPPDRWLSNARMTHYQAMLLDTDRVQFGPVVALNPATLLPLPEKEAPHDCLEILAETHGTRPDLTDQPIPDADYTWYTDGSSFLQEGQRRAGAAVTTETEVIWARALPAGTSAQRAELIALTQALKMAEGKKLNVYTDSRYAFATAHVHGEIYRRRGWLTSEGREIKNKNEILALLKALFLPKRLSIIHCPGHQKGNSAEARGNRMADQAAREAAMKAVLETSTLLAGKRTADGSEFEKRTADGSEFESPKKKAKVE

SEQ ID NO: 7448 - protein, 2087 aa, synthetic construct
MPAAKRVKLDGGDKKYSIGLDIGTNSVGWAVITDEYKVPSKKFKVLGNTDRHSIKKNLIGALLFDSGETAEATRLKRTARRRYTRRKNRICYLQEIFSNEMAKVDDSFFHRLEESFLVEEDKKHERHPIFGNIVDEVAYHEKYPTIYHLRKKLVDSTDKADLRLIYLALAHMIKFRGHFLIEGDLNPDNSDVDKLFIQLVQTYNQLFEENPINASGVDAKAILSARLSKSRRLENLIAQLPGEKKNGLFGNLIALSLGLTPNFKSNFDLAEDAKLQLSKDTYDDDLDNLLAQIGDQYADLFLAAKNLSDAILLSDILRVNTEITKAPLSASMIKRYDEHHQDLTLLKALVRQQLPEKYKEIFFDQSKNGYAGYIDGGASQEEFYKFIKPILEKMDGTEELLVKLNREDLLRKQRTFDNGSIPHQIHLGELHAILRRQEDFYPFLKDNREKIEKILTFRIPYYVGPLARGNSRFAWMTRKSEETITPWNFEEVVDKGASAQSFIERMTNFDKNLPNEKVLPKHSLLYEYFTVYNELTKVKYVTEGMRKPAFLSGEQKKAIVDLLFKTNRKVTVKQLKEDYFKKIECFDSVEISGVEDRFNASLGTYHDLLKIIKDKDFLDNEENEDILEDIVLTLTLFEDREMIEERLKTYAHLFDDKVMKQLKRRRYTGWGRLSRKLINGIRDKQSGKTILDFLKSDGFANRNFMQLIHDDSLTFKEDIQKAQVSGQGDSLHEHIANLAGSPAIKKGILQTVKVVDELVKVMGRHKPENIVIEMARENQTTQKGQKNSRERMKRIEEGIKELGSQILKEHPVENTQLQNEKLYLYYLQNGRDMYVDQELDINRLSDYDVDHIVPQSFLKDDSIDNKVLTRSDKARGKSDNVPSEEVVKKMKNYWRQLLNAKLITQRKFDNLTKAERGGLSELDKAGFIKRQLVETRQITKHVAQILDSRMNTKYDENDKLIREVKVITLKSKLVSDFRKDFQFYKVREINNYHHAHDAYLNAVVGTALIKKYPKLESEFVYGDYKVYDVRKMIAKSEQEIGKATAKYFFYSNIMNFFKTEITLANGEIRKRPLIETNGETGEIVWDKGRDFATVRKVLSMPQVNIVKKTEVQTGGFSKESILPKRNSDKLIARKKDWDPKKYGGFDSPTVAYSVLVVAKVEKGKSKKLKSVKELLGITIMERSSFEKNPIDFLEAKGYKEVKKDLIIKLPKYSLFELENGRKRMLASAGELQKGNELALPSKYVNFLYLASHYEKLKGSPEDNEQKQLFVEQHKHYLDEIIEQISEFSKRVILADANLDKVLSAYNKHRDKPIREQAENIIHLFTLTNLGAPAAFKYFDTTIDRKRYTSTKEVLDATLIHQSITGLYETRIDLSQLGGDGGGGGEAAAKPAPGGVPWILKKPLELTIKLDLEEQQGTLLNNSILSKKGKEELKQLFEKYSALWQSWENQVGHRRIRPHKIATGTVKPTPQKQYHINPKAKPDIQIVINDLLKQGVLIQKESTMNTPVYPVPKPNGRWRMVLDYRAVNKVTPLIAVQNQHSYGILGSLFKGRYKTTIDLSNGFWAHPIVPEDYWITAFTWQGKQYCWTVLPQGFLNSPGLFTGDVVDLLQGIPNVEVYVDDVYISHDSEKEHLEYLDILFNRLKEAGYIISLKKSNIANSIVDFLGFQITNEGRGLTDTFKEKLENITAPTTLKQLQSILGLLNFARNFIPDFTELIAPLYALIPKSTKNYVPWQIEHSTTLETLITKLNGAEYLQGRKGDKTLIMKVNASYTTGYIRYYNEGEKKPISYVSIVFSKTELKFTELEKLLTTVHKGLLKALDLSMGQNIHVYSPIVSMQNIQKTPQTAKKALASRWLSWLSYLEDPRIRFFYDPQMPALKDLPAVDTGKDNKKHPSNFQHIFYTDGSAITSPTKEGHLNAGMGIVYFINKDGNLQKQQEWSISLGNHTAQFAEIAAFEFALKKCLPLGGNILVVTDSNYVAKAYNEELDVWASNGFVNNRKKPLKHISKWKSVADLKRLRPDVVVTHEPGHQKLDSSPHAYGNNLADQLATQASFKVHAGKRTADGSEFEKRTADGSEFESPKKKAKVE

SEQ ID NO: 7449 - protein, 2087 aa, synthetic construct
MPAAKRVKLDGGDKKYSIGLDIGTNSVGWAVITDEYKVPSKKFKVLGNTDRHSIKKNLIGALLFDSGETAEATRLKRTARRRYTRRKNRICYLQEIFSNEMAKVDDSFFHRLEESFLVEEDKKHERHPIFGNIVDEVAYHEKYPTIYHLRKKLVDSTDKADLRLIYLALAHMIKFRGHFLIEGDLNPDNSDVDKLFIQLVQTYNQLFEENPINASGVDAKAILSARLSKSRRLENLIAQLPGEKKNGLFGNLIALSLGLTPNFKSNFDLAEDAKLQLSKDTYDDDLDNLLAQIGDQYADLFLAAKNLSDAILLSDILRVNTEITKAPLSASMIKRYDEHHQDLTLLKALVRQQLPEKYKEIFFDQSKNGYAGYIDGGASQEEFYKFIKPILEKMDGTEELLVKLNREDLLRKQRTFDNGSIPHQIHLGELHAILRRQEDFYPFLKDNREKIEKILTFRIPYYVGPLARGNSRFAWMTRKSEETITPWNFEEVVDKGASAQSFIERMTNFDKNLPNEKVLPKHSLLYEYFTVYNELTKVKYVTEGMRKPAFLSGEQKKAIVDLLFKTNRKVTVKQLKEDYFKKIECFDSVEISGVEDRFNASLGTYHDLLKIIKDKDFLDNEENEDILEDIVLTLTLFEDREMIEERLKTYAHLFDDKVMKQLKRRRYTGWGRLSRKLINGIRDKQSGKTILDFLKSDGFANRNFMQLIHDDSLTFKEDIQKAQVSGQGDSLHEHIANLAGSPAIKKGILQTVKVVDELVKVMGRHKPENIVIEMARENQTTQKGQKNSRERMKRIEEGIKELGSQILKEHPVENTQLQNEKLYLYYLQNGRDMYVDQELDINRLSDYDVDHIVPQSFLKDDSIDNKVLTRSDKARGKSDNVPSEEVVKKMKNYWRQLLNAKLITQRKFDNLTKAERGGLSELDKAGFIKRQLVETRQITKHVAQILDSRMNTKYDENDKLIREVKVITLKSKLVSDFRKDFQFYKVREINNYHHAHDAYLNAVVGTALIKKYPKLESEFVYGDYKVYDVRKMIAKSEQEIGKATAKYFFYSNIMNFFKTEITLANGEIRKRPLIETNGETGEIVWDKGRDFATVRKVLSMPQVNIVKKTEVQTGGFSKESILPKRNSDKLIARKKDWDPKKYGGFDSPTVAYSVLVVAKVEKGKSKKLKSVKELLGITIMERSSFEKNPIDFLEAKGYKEVKKDLIIKLPKYSLFELENGRKRMLASAGELQKGNELALPSKYVNFLYLASHYEKLKGSPEDNEQKQLFVEQHKHYLDEIIEQISEFSKRVILADANLDKVLSAYNKHRDKPIREQAENIIHLFTLTNLGAPAAFKYFDTTIDRKRYTSTKEVLDATLIHQSITGLYETRIDLSQLGGDGGGGGEAAAKPAPGGVPWILKKPLELTIKLDLEEQQGTLLNNSILSKKGKEELKQLFEKYSALWQSWENQVGHRRIRPHKIATGTVKPTPQKQYHINPKAKPDIQIVINDLLKQGVLIQKESTMNTPVYPVPKPNGRWRMVLDYRAVNKVTPLIAVQNQHSYGILGSLFKGRYKTTIDLSNGFWAHPIVPEDYWITAFTWQGKQYCWTVLPQGFLNSPGLFNGDVVDLLQGIPNVEVYVDDVYISHDSEKEHLEYLDILFNRLKEAGYIISLKKSNIANSIVDFLGFQITNEGRGLTDTFKEKLENITAPTTLKQLQSILGLLNFARNFIPDFTELIAPLYALIPKSPKNYVPWQIEHSTTLETLITKLNGAEYLQGRKGDKTLIMKVNASYTTGYIRYYNEGEKKPISYVSIVFSKTELKFTELEKLLTTVHKGLLKALDLSMGQNIHVYSPIVSMQNIQKTPQTAKKALASRWLSWLSYLEDPRIRFFYDPQMPALKDLPAVDTGKDNKKHPSNFQHIFYTDGSAITSPTKEGHLNAGMGIVYFINKDGNLQKQQEWSISLGNHTAQFAEIAAFEFALKKCLPLGGNILVVTDSNYVAKAYNEELDVWASNGFVNNRKKPLKHISKWKSVADLKRLRPDVVVTHEPGHQKLDSSPHAYGNNLADQLATQASFKVHAGKRTADGSEFEKRTADGSEFESPKKKAKVE

SEQ ID NO: 7450 - protein, 2176 aa, synthetic construct
MPAAKRVKLDGGDKKYSIGLDIGTNSVGWAVITDEYKVPSKKFKVLGNTDRHSIKKNLIGALLFDSGETAEATRLKRTARRRYTRRKNRICYLQEIFSNEMAKVDDSFFHRLEESFLVEEDKKHERHPIFGNIVDEVAYHEKYPTIYHLRKKLVDSTDKADLRLIYLALAHMIKFRGHFLIEGDLNPDNSDVDKLFIQLVQTYNQLFEENPINASGVDAKAILSARLSKSRRLENLIAQLPGEKKNGLFGNLIALSLGLTPNFKSNFDLAEDAKLQLSKDTYDDDLDNLLAQIGDQYADLFLAAKNLSDAILLSDILRVNTEITKAPLSASMIKRYDEHHQDLTLLKALVRQQLPEKYKEIFFDQSKNGYAGYIDGGASQEEFYKFIKPILEKMDGTEELLVKLNREDLLRKQRTFDNGSIPHQIHLGELHAILRRQEDFYPFLKDNREKIEKILTFRIPYYVGPLARGNSRFAWMTRKSEETITPWNFEEVVDKGASAQSFIERMTNFDKNLPNEKVLPKHSLLYEYFTVYNELTKVKYVTEGMRKPAFLSGEQKKAIVDLLFKTNRKVTVKQLKEDYFKKIECFDSVEISGVEDRFNASLGTYHDLLKIIKDKDFLDNEENEDILEDIVLTLTLFEDREMIEERLKTYAHLFDDKVMKQLKRRRYTGWGRLSRKLINGIRDKQSGKTILDFLKSDGFANRNFMQLIHDDSLTFKEDIQKAQVSGQGDSLHEHIANLAGSPAIKKGILQTVKVVDELVKVMGRHKPENIVIEMARENQTTQKGQKNSRERMKRIEEGIKELGSQILKEHPVENTQLQNEKLYLYYLQNGRDMYVDQELDINRLSDYDVDHIVPQSFLKDDSIDNKVLTRSDKARGKSDNVPSEEVVKKMKNYWRQLLNAKLITQRKFDNLTKAERGGLSELDKAGFIKRQLVETRQITKHVAQILDSRMNTKYDENDKLIREVKVITLKSKLVSDFRKDFQFYKVREINNYHHAHDAYLNAVVGTALIKKYPKLESEFVYGDYKVYDVRKMIAKSEQEIGKATAKYFFYSNIMNFFKTEITLANGEIRKRPLIETNGETGEIVWDKGRDFATVRKVLSMPQVNIVKKTEVQTGGFSKESILPKRNSDKLIARKKDWDPKKYGGFDSPTVAYSVLVVAKVEKGKSKKLKSVKELLGITIMERSSFEKNPIDFLEAKGYKEVKKDLIIKLPKYSLFELENGRKRMLASAGELQKGNELALPSKYVNFLYLASHYEKLKGSPEDNEQKQLFVEQHKHYLDEIIEQISEFSKRVILADANLDKVLSAYNKHRDKPIREQAENIIHLFTLTNLGAPAAFKYFDTTIDRKRYTSTKEVLDATLIHQSITGLYETRIDLSQLGGDGGGGGEAAAKPAPGGMNPLQLLQPLPAEIKGTKLLAHWNSGATITCIPESFLEDEQPIKKTLIKTIHGEKQQNVYYVTFKVKGRKVEAEVIASPYEYILLSPTDVPWLTQQPLQLTILVPLQEYQEKILSKTALPEDQKQQLKTLFVKYDNLWQHWENQVGHRKIRPHNIATGDYPPRPQKQYPINPKAKPSIQIVIDDLLKQGVLTPQNSTMNTPVYPVPKPDGRWRMVLDYREVNKTIPLTAAQNQHSAGILATIVRQKYKTTLDLANGFWAHPITPESYWLTAFTWQGKQYCWTRLPQGFLNSPALFNADVVDLLKEIPNVQVYVDDIYLSHDDPKEHVQQLEKVFQILLQAGYVVSLKKSEIGQKTVEFLGFNITKEGRGLTDTFKTKLLNITPPKDLKQLQSILGKLNFARNFIPNFAELVQPLYNLIAPAKGKYIEWSEENTKQLNMVIEALNTASNLEERLPEQRLVIKVNTSPSAGYVRYYNETGKKPIMYLNYVFSKAELKFSMLEKLLTTMHKALIKAMDLAMGQEILVYSPIVSMTKIQKTPLPERKALPIRWITWMTYLEDPRIQFHYDKTLPELKHIPDVYTSSQSPVKHPSQYEGVFYTDGSAIKSPDPTKSNNAGMGIVHATYKPEYQVLNQWSIPLGNHTAQMAEIAAVEFACKKALKIPGPVLVITDSFYVAESANKELPYWKSNGFVNNKKKPLKHISKWKSIAECLSMKPDITIQHEKGISLQIPVFILKGNALADKLATQGSYVVNAGKRTADGSEFEKRTADGSEFESPKKKAKVE

SEQ ID NO: 7451 - protein, 2127 aa, synthetic construct
MPAAKRVKLDGGDKKYSIGLDIGTNSVGWAVITDEYKVPSKKFKVLGNTDRHSIKKNLIGALLFDSGETAEATRLKRTARRRYTRRKNRICYLQEIFSNEMAKVDDSFFHRLEESFLVEEDKKHERHPIFGNIVDEVAYHEKYPTIYHLRKKLVDSTDKADLRLIYLALAHMIKFRGHFLIEGDLNPDNSDVDKLFIQLVQTYNQLFEENPINASGVDAKAILSARLSKSRRLENLIAQLPGEKKNGLFGNLIALSLGLTPNFKSNFDLAEDAKLQLSKDTYDDDLDNLLAQIGDQYADLFLAAKNLSDAILLSDILRVNTEITKAPLSASMIKRYDEHHQDLTLLKALVRQQLPEKYKEIFFDQSKNGYAGYIDGGASQEEFYKFIKPILEKMDGTEELLVKLNREDLLRKQRTFDNGSIPHQIHLGELHAILRRQEDFYPFLKDNREKIEKILTFRIPYYVGPLARGNSRFAWMTRKSEETITPWNFEEVVDKGASAQSFIERMTNFDKNLPNEKVLPKHSLLYEYFTVYNELTKVKYVTEGMRKPAFLSGEQKKAIVDLLFKTNRKVTVKQLKEDYFKKIECFDSVEISGVEDRFNASLGTYHDLLKIIKDKDFLDNEENEDILEDIVLTLTLFEDREMIEERLKTYAHLFDDKVMKQLKRRRYTGWGRLSRKLINGIRDKQSGKTILDFLKSDGFANRNFMQLIHDDSLTFKEDIQKAQVSGQGDSLHEHIANLAGSPAIKKGILQTVKVVDELVKVMGRHKPENIVIEMARENQTTQKGQKNSRERMKRIEEGIKELGSQILKEHPVENTQLQNEKLYLYYLQNGRDMYVDQELDINRLSDYDVDHIVPQSFLKDDSIDNKVLTRSDKARGKSDNVPSEEVVKKMKNYWRQLLNAKLITQRKFDNLTKAERGGLSELDKAGFIKRQLVETRQITKHVAQILDSRMNTKYDENDKLIREVKVITLKSKLVSDFRKDFQFYKVREINNYHHAHDAYLNAVVGTALIKKYPKLESEFVYGDYKVYDVRKMIAKSEQEIGKATAKYFFYSNIMNFFKTEITLANGEIRKRPLIETNGETGEIVWDKGRDFATVRKVLSMPQVNIVKKTEVQTGGFSKESILPKRNSDKLIARKKDWDPKKYGGFDSPTVAYSVLVVAKVEKGKSKKLKSVKELLGITIMERSSFEKNPIDFLEAKGYKEVKKDLIIKLPKYSLFELENGRKRMLASAGELQKGNELALPSKYVNFLYLASHYEKLKGSPEDNEQKQLFVEQHKHYLDEIIEQISEFSKRVILADANLDKVLSAYNKHRDKPIREQAENIIHLFTLTNLGAPAAFKYFDTTIDRKRYTSTKEVLDATLIHQSITGLYETRIDLSQLGGDGGGGGEAAAKPAPGGLLGRDLLTKLKAQIQFSTEGPQVTWEDRPAMCLVLNLEEEYRLHEKPVPPSIDPSWLQLFPMVWAEKAGMGLANQVPPVVVELKSDASPVAVRQYPMSKEAREGIRPHIQRFLDLGILVPCQSPWNTPLLPVKKPGTNDYRPVQDLREVNKRVQDIHPTVPNPYNLLSSLPPSHTWYSVLDLKDAFFCLKLHPNSQPLFAFEWRDPEKGNTGQLTWTRLPQGFKNSPTLFNEALHRDLASFRALNPQVVMLQYVDDLLVAAPTYRDCKEGTRRLLQELSKLGYRVSAKKAQLCREEVTYLGYLLKGGKRWLTPARKATVMKIPTPTTPRQVREFLGTAGFCRLWIPGFASLAAPLYPLTRPKVPFTWTEAHQEAFGRIKEALLSAPALALPDLTKPFALYVDEKEGVARGVLTQTLGPWRRPVAYLSKKLDPVASGWPTCLKAIAAVALLLKDADKLTLGQNVLVIAPHNLESIVRQPPDRWMTNARMTHYQSLLLNERVSFAPPAILNPATLLPVESDDTPIHICSEILAEETGTRPDLRDQPLPGVPAWYTDGSSFIMDGRRQAGAAIVDNKRTVWASNLPEGTSAQKAELIALTQALRLAEGKSINIYTDSRYAFATAHVHGAIYKQRGWLTSAGKDIKNKEEILALLEAIHLPKRVAIIHCPGHQRGTDPVATGNRKADEAAKQAAQSTRILTETTKNAGKRTADGSEFEKRTADGSEFESPKKKAKVE

SEQ ID NO: 7452 - protein, 2096 aa, synthetic construct
MPAAKRVKLDGGDKKYSIGLDIGTNSVGWAVITDEYKVPSKKFKVLGNTDRHSIKKNLIGALLFDSGETAEATRLKRTARRRYTRRKNRICYLQEIFSNEMAKVDDSFFHRLEESFLVEEDKKHERHPIFGNIVDEVAYHEKYPTIYHLRKKLVDSTDKADLRLIYLALAHMIKFRGHFLIEGDLNPDNSDVDKLFIQLVQTYNQLFEENPINASGVDAKAILSARLSKSRRLENLIAQLPGEKKNGLFGNLIALSLGLTPNFKSNFDLAEDAKLQLSKDTYDDDLDNLLAQIGDQYADLFLAAKNLSDAILLSDILRVNTEITKAPLSASMIKRYDEHHQDLTLLKALVRQQLPEKYKEIFFDQSKNGYAGYIDGGASQEEFYKFIKPILEKMDGTEELLVKLNREDLLRKQRTFDNGSIPHQIHLGELHAILRRQEDFYPFLKDNREKIEKILTFRIPYYVGPLARGNSRFAWMTRKSEETITPWNFEEVVDKGASAQSFIERMTNFDKNLPNEKVLPKHSLLYEYFTVYNELTKVKYVTEGMRKPAFLSGEQKKAIVDLLFKTNRKVTVKQLKEDYFKKIECFDSVEISGVEDRFNASLGTYHDLLKIIKDKDFLDNEENEDILEDIVLTLTLFEDREMIEERLKTYAHLFDDKVMKQLKRRRYTGWGRLSRKLINGIRDKQSGKTILDFLKSDGFANRNFMQLIHDDSLTFKEDIQKAQVSGQGDSLHEHIANLAGSPAIKKGILQTVKVVDELVKVMGRHKPENIVIEMARENQTTQKGQKNSRERMKRIEEGIKELGSQILKEHPVENTQLQNEKLYLYYLQNGRDMYVDQELDINRLSDYDVDHIVPQSFLKDDSIDNKVLTRSDKARGKSDNVPSEEVVKKMKNYWRQLLNAKLITQRKFDNLTKAERGGLSELDKAGFIKRQLVETRQITKHVAQILDSRMNTKYDENDKLIREVKVITLKSKLVSDFRKDFQFYKVREINNYHHAHDAYLNAVVGTALIKKYPKLESEFVYGDYKVYDVRKMIAKSEQEIGKATAKYFFYSNIMNFFKTEITLANGEIRKRPLIETNGETGEIVWDKGRDFATVRKVLSMPQVNIVKKTEVQTGGFSKESILPKRNSDKLIARKKDWDPKKYGGFDSPTVAYSVLVVAKVEKGKSKKLKSVKELLGITIMERSSFEKNPIDFLEAKGYKEVKKDLIIKLPKYSLFELENGRKRMLASAGELQKGNELALPSKYVNFLYLASHYEKLKGSPEDNEQKQLFVEQHKHYLDEIIEQISEFSKRVILADANLDKVLSAYNKHRDKPIREQAENIIHLFTLTNLGAPAAFKYFDTTIDRKRYTSTKEVLDATLIHQSITGLYETRIDLSQLGGDGGGGGEAAAKPAPGGTLGIEDEYRLHETSTEPDVSLGSTWLSDFPQAWAETGGMGLAVRQAPLIIPLKATSTPVSIQQYPMSHEARLGIKPHIQRLLDQGILVPCQSPWNTPLLPVKKPGTNDYRPVQDLREVNKRVEDIHPTVPNPYNLLSGLPPSHQWYTVLDLKDAFFCLRLHPTSQPLFAFEWRDPGMGISGQLTWTRLPQGFKNSPTLFDEALHRDLADFRIQHPDLILLQYVDDILLAATSELDCQQGTRALLQTLGDLGYRASAKKAQICQKQVKYLGYLLREGQRWLTEARKETVMGQPVPKTPRQLREFLGTAGFCRLWIPGFAEMAAPLYPLTKTGTLFSWGPDQQKAYQEIKQALLTAPALGLPDLTKPFELFVDEKQGYAKGVLTQKLGPWRRPVAYLSKKLDPVAAGWPPCLRMVAAIAVLTKDAGKLTMGQPLVILAPHAVEALVKQPPDRWLSNARMTHYQAMLLDTDRVQFGPVVALNPATLLPLPEEGAPHDCLEILAETHGTRPDLTDQPIPDADHTWYTDGSSFLQEGQRKAGAAVTTETEVIWAGALPAGTSAQRAELIALTQALKMAEGKRLNVYTDSRYAFATAHIHGEIYRRRGLLTSEGREIKNKSEILALLKALFLPKRLSIIHCLGHQKGDSAEARGNRLADQAAREAAIKTPPDTSTLLAGKRTADGSEFEKRTADGSEFESPKKKAKVE

SEQ ID NO: 7453 - protein, 2096 aa, synthetic construct
MPAAKRVKLDGGDKKYSIGLDIGTNSVGWAVITDEYKVPSKKFKVLGNTDRHSIKKNLIGALLFDSGETAEATRLKRTARRRYTRRKNRICYLQEIFSNEMAKVDDSFFHRLEESFLVEEDKKHERHPIFGNIVDEVAYHEKYPTIYHLRKKLVDSTDKADLRLIYLALAHMIKFRGHFLIEGDLNPDNSDVDKLFIQLVQTYNQLFEENPINASGVDAKAILSARLSKSRRLENLIAQLPGEKKNGLFGNLIALSLGLTPNFKSNFDLAEDAKLQLSKDTYDDDLDNLLAQIGDQYADLFLAAKNLSDAILLSDILRVNTEITKAPLSASMIKRYDEHHQDLTLLKALVRQQLPEKYKEIFFDQSKNGYAGYIDGGASQEEFYKFIKPILEKMDGTEELLVKLNREDLLRKQRTFDNGSIPHQIHLGELHAILRRQEDFYPFLKDNREKIEKILTFRIPYYVGPLARGNSRFAWMTRKSEETITPWNFEEVVDKGASAQSFIERMTNFDKNLPNEKVLPKHSLLYEYFTVYNELTKVKYVTEGMRKPAFLSGEQKKAIVDLLFKTNRKVTVKQLKEDYFKKIECFDSVEISGVEDRFNASLGTYHDLLKIIKDKDFLDNEENEDILEDIVLTLTLFEDREMIEERLKTYAHLFDDKVMKQLKRRRYTGWGRLSRKLINGIRDKQSGKTILDFLKSDGFANRNFMQLIHDDSLTFKEDIQKAQVSGQGDSLHEHIANLAGSPAIKKGILQTVKVVDELVKVMGRHKPENIVIEMARENQTTQKGQKNSRERMKRIEEGIKELGSQILKEHPVENTQLQNEKLYLYYLQNGRDMYVDQELDINRLSDYDVDHIVPQSFLKDDSIDNKVLTRSDKARGKSDNVPSEEVVKKMKNYWRQLLNAKLITQRKFDNLTKAERGGLSELDKAGFIKRQLVETRQITKHVAQILDSRMNTKYDENDKLIREVKVITLKSKLVSDFRKDFQFYKVREINNYHHAHDAYLNAVVGTALIKKYPKLESEFVYGDYKVYDVRKMIAKSEQEIGKATAKYFFYSNIMNFFKTEITLANGEIRKRPLIETNGETGEIVWDKGRDFATVRKVLSMPQVNIVKKTEVQTGGFSKESILPKRNSDKLIARKKDWDPKKYGGFDSPTVAYSVLVVAKVEKGKSKKLKSVKELLGITIMERSSFEKNPIDFLEAKGYKEVKKDLIIKLPKYSLFELENGRKRMLASAGELQKGNELALPSKYVNFLYLASHYEKLKGSPEDNEQKQLFVEQHKHYLDEIIEQISEFSKRVILADANLDKVLSAYNKHRDKPIREQAENIIHLFTLTNLGAPAAFKYFDTTIDRKRYTSTKEVLDATLIHQSITGLYETRIDLSQLGGDGGGGGEAAAKPAPGGTLGIEDEYRLHETSTEPDVSLGSTWLSDFPQAWAETGGMGLAVRQAPLIIPLKATSTPVSIQQYPMSHEARLGIKPHIQRLLDQGILVPCQSPWNTPLLPVKKPGTNDYRPVQDLREVNKRVEDIHPTVPNPYNLLSGLPPSHQWYTVLDLKDAFFCLRLHPTSQPLFAFEWRDPGMGISGQLTWTRLPQGFKNSPTLFNEALHRDLADFRIQHPDLILLQYVDDILLAATSELDCQQGTRALLQTLGDLGYRASAKKAQICQKQVKYLGYLLREGQRWLTEARKETVMGQPVPKTPRQLREFLGTAGFCRLWIPGFAEMAAPLYPLTKPGTLFSWGPDQQKAYQEIKQALLTAPALGLPDLTKPFELFVDEKQGYAKGVLTQKLGPWRRPVAYLSKKLDPVAAGWPPCLRMVAAIAVLTKDAGKLTMGQPLVILAPHAVEALVKQPPDRWLSNARMTHYQAMLLDTDRVQFGPVVALNPATLLPLPEEGAPHDCLEILAETHGTRPDLTDQPIPDADHTWYTDGSSFLQEGQRKAGAAVTTETEVIWAGALPAGTSAQRAELIALTQALKMAEGKRLNVYTDSRYAFATAHIHGEIYRRRGWLTSEGREIKNKSEILALLKALFLPKRLSIIHCLGHQKGDSAEARGNRLADQAAREAAIKTPPDTSTLLAGKRTADGSEFEKRTADGSEFESPKKKAKVE

SEQ ID NO: 7454 - protein, 2096 aa, synthetic construct
MPAAKRVKLDGGDKKYSIGLDIGTNSVGWAVITDEYKVPSKKFKVLGNTDRHSIKKNLIGALLFDSGETAEATRLKRTARRRYTRRKNRICYLQEIFSNEMAKVDDSFFHRLEESFLVEEDKKHERHPIFGNIVDEVAYHEKYPTIYHLRKKLVDSTDKADLRLIYLALAHMIKFRGHFLIEGDLNPDNSDVDKLFIQLVQTYNQLFEENPINASGVDAKAILSARLSKSRRLENLIAQLPGEKKNGLFGNLIALSLGLTPNFKSNFDLAEDAKLQLSKDTYDDDLDNLLAQIGDQYADLFLAAKNLSDAILLSDILRVNTEITKAPLSASMIKRYDEHHQDLTLLKALVRQQLPEKYKEIFFDQSKNGYAGYIDGGASQEEFYKFIKPILEKMDGTEELLVKLNREDLLRKQRTFDNGSIPHQIHLGELHAILRRQEDFYPFLKDNREKIEKILTFRIPYYVGPLARGNSRFAWMTRKSEETITPWNFEEVVDKGASAQSFIERMTNFDKNLPNEKVLPKHSLLYEYFTVYNELTKVKYVTEGMRKPAFLSGEQKKAIVDLLFKTNRKVTVKQLKEDYFKKIECFDSVEISGVEDRFNASLGTYHDLLKIIKDKDFLDNEENEDILEDIVLTLTLFEDREMIEERLKTYAHLFDDKVMKQLKRRRYTGWGRLSRKLINGIRDKQSGKTILDFLKSDGFANRNFMQLIHDDSLTFKEDIQKAQVSGQGDSLHEHIANLAGSPAIKKGILQTVKVVDELVKVMGRHKPENIVIEMARENQTTQKGQKNSRERMKRIEEGIKELGSQILKEHPVENTQLQNEKLYLYYLQNGRDMYVDQELDINRLSDYDVDHIVPQSFLKDDSIDNKVLTRSDKARGKSDNVPSEEVVKKMKNYWRQLLNAKLITQRKFDNLTKAERGGLSELDKAGFIKRQLVETRQITKHVAQILDSRMNTKYDENDKLIREVKVITLKSKLVSDFRKDFQFYKVREINNYHHAHDAYLNAVVGTALIKKYPKLESEFVYGDYKVYDVRKMIAKSEQEIGKATAKYFFYSNIMNFFKTEITLANGEIRKRPLIETNGETGEIVWDKGRDFATVRKVLSMPQVNIVKKTEVQTGGFSKESILPKRNSDKLIARKKDWDPKKYGGFDSPTVAYSVLVVAKVEKGKSKKLKSVKELLGITIMERSSFEKNPIDFLEAKGYKEVKKDLIIKLPKYSLFELENGRKRMLASAGELQKGNELALPSKYVNFLYLASHYEKLKGSPEDNEQKQLFVEQHKHYLDEIIEQISEFSKRVILADANLDKVLSAYNKHRDKPIREQAENIIHLFTLTNLGAPAAFKYFDTTIDRKRYTSTKEVLDATLIHQSITGLYETRIDLSQLGGDGGGGGEAAAKPAPGGTLNIEDEYRLHETSKGPDVPLGSTWLSDFPQAWAETGGMGLAVRQAPLIIPLKATSTPVSIKQYPMSQEARLGIKPHIQRLLDQGILVPCQSPWNTPLLPVKKPGTNDYRPVQDLREVNKRVEDIHPTVPNPYNLLSGLPPSHQWYTVLDLKDAFFCLRLHPTSQSLFAFEWRDPEMGISGQLTWTRLPQGFKNSPTLFNEALHRDLADFRIQHPDLILLQYVDDLLLAATSELDCQQGTRALLQTLGDLGYRASAKKAQICQKQVKYLGYLLKEGQRWLTEARKETVMGQPTPKTPRQLREFLGTAGFCRLWIPGFAEMAAPLYPLTKPGTLFEWGPDQQKAYQEIKQALLTAPALGLPDLTKPFELFVDEKQGYAKGVLTQKLGPWRRPVAYLSKKLDPVAAGWPPCLRMVAAIAVLTKDAGKLTMGQPLVILAPHAVEALVKQPPDRWLSNARMTHYQALLLDTDRVQFGPIVALNPATLLPLPEEGLQHDCLDILAEAHGTRPDLTDQPLPDADHTWYTDGSSFLQEGQRKAGAAVTTETEVVWAKALPAGTSAQRAELIALTQALKMAEGKKLNVYTDSRYAFATAHIHGEIYRRRGWLTSEGKEIKNKDEILALLKALFLPKRLSIIHCPGHQKGNRAEARGNRMADQAAREVATRETPETSTLLAGKRTADGSEFEKRTADGSEFESPKKKAKVE

SEQ ID NO: 7455 - protein, 2096 aa, synthetic construct
MPAAKRVKLDGGDKKYSIGLDIGTNSVGWAVITDEYKVPSKKFKVLGNTDRHSIKKNLIGALLFDSGETAEATRLKRTARRRYTRRKNRICYLQEIFSNEMAKVDDSFFHRLEESFLVEEDKKHERHPIFGNIVDEVAYHEKYPTIYHLRKKLVDSTDKADLRLIYLALAHMIKFRGHFLIEGDLNPDNSDVDKLFIQLVQTYNQLFEENPINASGVDAKAILSARLSKSRRLENLIAQLPGEKKNGLFGNLIALSLGLTPNFKSNFDLAEDAKLQLSKDTYDDDLDNLLAQIGDQYADLFLAAKNLSDAILLSDILRVNTEITKAPLSASMIKRYDEHHQDLTLLKALVRQQLPEKYKEIFFDQSKNGYAGYIDGGASQEEFYKFIKPILEKMDGTEELLVKLNREDLLRKQRTFDNGSIPHQIHLGELHAILRRQEDFYPFLKDNREKIEKILTFRIPYYVGPLARGNSRFAWMTRKSEETITPWNFEEVVDKGASAQSFIERMTNFDKNLPNEKVLPKHSLLYEYFTVYNELTKVKYVTEGMRKPAFLSGEQKKAIVDLLFKTNRKVTVKQLKEDYFKKIECFDSVEISGVEDRFNASLGTYHDLLKIIKDKDFLDNEENEDILEDIVLTLTLFEDREMIEERLKTYAHLFDDKVMKQLKRRRYTGWGRLSRKLINGIRDKQSGKTILDFLKSDGFANRNFMQLIHDDSLTFKEDIQKAQVSGQGDSLHEHIANLAGSPAIKKGILQTVKVVDELVKVMGRHKPENIVIEMARENQTTQKGQKNSRERMKRIEEGIKELGSQILKEHPVENTQLQNEKLYLYYLQNGRDMYVDQELDINRLSDYDVDHIVPQSFLKDDSIDNKVLTRSDKARGKSDNVPSEEVVKKMKNYWRQLLNAKLITQRKFDNLTKAERGGLSELDKAGFIKRQLVETRQITKHVAQILDSRMNTKYDENDKLIREVKVITLKSKLVSDFRKDFQFYKVREINNYHHAHDAYLNAVVGTALIKKYPKLESEFVYGDYKVYDVRKMIAKSEQEIGKATAKYFFYSNIMNFFKTEITLANGEIRKRPLIETNGETGEIVWDKGRDFATVRKVLSMPQVNIVKKTEVQTGGFSKESILPKRNSDKLIARKKDWDPKKYGGFDSPTVAYSVLVVAKVEKGKSKKLKSVKELLGITIMERSSFEKNPIDFLEAKGYKEVKKDLIIKLPKYSLFELENGRKRMLASAGELQKGNELALPSKYVNFLYLASHYEKLKGSPEDNEQKQLFVEQHKHYLDEIIEQISEFSKRVILADANLDKVLSAYNKHRDKPIREQAENIIHLFTLTNLGAPAAFKYFDTTIDRKRYTSTKEVLDATLIHQSITGLYETRIDLSQLGGDGGGGGEAAAKPAPGGTLNIEDEHRLHETSKEPDVSLGSTWLSDFPQAWAETGGMGLAVRQAPLIIPLKATSTPVSIKQYPMSQEARLGIKPHIQRLLDQGILVPCQSPWNTPLLPVKKPGTNDYRPVQDLREVNKRVEDIHPTVPNPYNLLSGLPPSHQWYTVLDLKDAFFCLRLHPTSQPLFAFEWRDPEMGISGQLTWTRLPQGFKNSPTLFDEALHRDLADFRIQHPDLILLQYVDDLLLAATSELDCQQGTRALLQTLGNLGYRASAKKAQICQKQVKYLGYLLKEGQRWLTEARKETVMGQPTPKTPRQLREFLGTAGFCRLWIPGFAEMAAPLYPLTKTGTLFNWGPDQQKAYQEIKQALLTAPALGLPDLTKPFELFVDEKQGYAKGVLTQKLGPWRRPVAYLSKKLDPVAAGWPPCLRMVAAIAVLTKDAGKLTMGQPLVILAPHAVEALVKQPPDRWLSNARMTHYQALLLDTDRVQFGPVVALNPATLLPLPEEGLQHNCLDILAEAHGTRPDLTDQPLPDADHTWYTDGSSLLQEGQRKAGAAVTTETEVIWAKALPAGTSAQRAELIALTQALKMAEGKKLNVYTDSRYAFATAHIHGEIYRRRGLLTSEGKEIKNKDEILALLKALFLPKRLSIIHCPGHQKGHSAEARGNRMADQAARKAAITETPDTSTLLAGKRTADGSEFEKRTADGSEFESPKKKAKVE

SEQ ID NO: 7456 - protein, 2087 aa, synthetic construct
MPAAKRVKLDGGDKKYSIGLDIGTNSVGWAVITDEYKVPSKKFKVLGNTDRHSIKKNLIGALLFDSGETAEATRLKRTARRRYTRRKNRICYLQEIFSNEMAKVDDSFFHRLEESFLVEEDKKHERHPIFGNIVDEVAYHEKYPTIYHLRKKLVDSTDKADLRLIYLALAHMIKFRGHFLIEGDLNPDNSDVDKLFIQLVQTYNQLFEENPINASGVDAKAILSARLSKSRRLENLIAQLPGEKKNGLFGNLIALSLGLTPNFKSNFDLAEDAKLQLSKDTYDDDLDNLLAQIGDQYADLFLAAKNLSDAILLSDILRVNTEITKAPLSASMIKRYDEHHQDLTLLKALVRQQLPEKYKEIFFDQSKNGYAGYIDGGASQEEFYKFIKPILEKMDGTEELLVKLNREDLLRKQRTFDNGSIPHQIHLGELHAILRRQEDFYPFLKDNREKIEKILTFRIPYYVGPLARGNSRFAWMTRKSEETITPWNFEEVVDKGASAQSFIERMTNFDKNLPNEKVLPKHSLLYEYFTVYNELTKVKYVTEGMRKPAFLSGEQKKAIVDLLFKTNRKVTVKQLKEDYFKKIECFDSVEISGVEDRFNASLGTYHDLLKIIKDKDFLDNEENEDILEDIVLTLTLFEDREMIEERLKTYAHLFDDKVMKQLKRRRYTGWGRLSRKLINGIRDKQSGKTILDFLKSDGFANRNFMQLIHDDSLTFKEDIQKAQVSGQGDSLHEHIANLAGSPAIKKGILQTVKVVDELVKVMGRHKPENIVIEMARENQTTQKGQKNSRERMKRIEEGIKELGSQILKEHPVENTQLQNEKLYLYYLQNGRDMYVDQELDINRLSDYDVDHIVPQSFLKDDSIDNKVLTRSDKARGKSDNVPSEEVVKKMKNYWRQLLNAKLITQRKFDNLTKAERGGLSELDKAGFIKRQLVETRQITKHVAQILDSRMNTKYDENDKLIREVKVITLKSKLVSDFRKDFQFYKVREINNYHHAHDAYLNAVVGTALIKKYPKLESEFVYGDYKVYDVRKMIAKSEQEIGKATAKYFFYSNIMNFFKTEITLANGEIRKRPLIETNGETGEIVWDKGRDFATVRKVLSMPQVNIVKKTEVQTGGFSKESILPKRNSDKLIARKKDWDPKKYGGFDSPTVAYSVLVVAKVEKGKSKKLKSVKELLGITIMERSSFEKNPIDFLEAKGYKEVKKDLIIKLPKYSLFELENGRKRMLASAGELQKGNELALPSKYVNFLYLASHYEKLKGSPEDNEQKQLFVEQHKHYLDEIIEQISEFSKRVILADANLDKVLSAYNKHRDKPIREQAENIIHLFTLTNLGAPAAFKYFDTTIDRKRYTSTKEVLDATLIHQSITGLYETRIDLSQLGGDGGGGGEAAAKPAPGGVPWLMKKPLQLTVLVPLHEYQERLLQQTALPKEQKELLQKLFLKYDALWQHWENQVGHRRIKPHNIATGTLAPRPQKQYPINPKAKPSIQIVIDDLLKQGVLIQQNSTMNTPVYPVPKPDGKWRMVLDYREVNKTIPLIAAQNQHSAGILSSIYRGKYKTTLDLTNGFWAHPITPESYWLTAFTWQGKQYCWTRLPQGFLNSPALFNADVVDLLKEIPNVQAYVDDIYISHDDPQEHLEQLEKIFSILLNAGYVVSLKKSEIAQREVEFLGFNITKEGRGLTDTFKQKLLNITPPKDLKQLQSILGKLNFARNFIPNYSELVKPLYTIVAPANGKFISWTEDNSNQLQHIISVLNQADNLEERNPETRLIIKVNSSPSAGYIRYYNEGSKRPIMYVNYIFSKAEAKFTQTEKLLTTMHKGLIKAMDLAMGQEILVYSPIVSMTKIQRTPLPERKALPVRWITWMTYLEDPRIQFHYDKSLPELQQIPNVTEDVIAKTKHPSEFAMVFYTDGSAIKHPDVNKSHSAGMGIAQVQFIPEYKIVHQWSIPLGDHTAQLAEIAAVEFACKKALKISGPVLIVTDSFYVAESANKELPYWKSNGFLNNKKKPLRHVSKWKSIAECLQLKPDIIIMHEKGHQQPMTTLHTEGNNLADKLATQGSYVVHAGKRTADGSEFEKRTADGSEFESPKKKAKVE

SEQ ID NO: 7457 - protein, 2087 aa, synthetic construct
MPAAKRVKLDGGDKKYSIGLDIGTNSVGWAVITDEYKVPSKKFKVLGNTDRHSIKKNLIGALLFDSGETAEATRLKRTARRRYTRRKNRICYLQEIFSNEMAKVDDSFFHRLEESFLVEEDKKHERHPIFGNIVDEVAYHEKYPTIYHLRKKLVDSTDKADLRLIYLALAHMIKFRGHFLIEGDLNPDNSDVDKLFIQLVQTYNQLFEENPINASGVDAKAILSARLSKSRRLENLIAQLPGEKKNGLFGNLIALSLGLTPNFKSNFDLAEDAKLQLSKDTYDDDLDNLLAQIGDQYADLFLAAKNLSDAILLSDILRVNTEITKAPLSASMIKRYDEHHQDLTLLKALVRQQLPEKYKEIFFDQSKNGYAGYIDGGASQEEFYKFIKPILEKMDGTEELLVKLNREDLLRKQRTFDNGSIPHQIHLGELHAILRRQEDFYPFLKDNREKIEKILTFRIPYYVGPLARGNSRFAWMTRKSEETITPWNFEEVVDKGASAQSFIERMTNFDKNLPNEKVLPKHSLLYEYFTVYNELTKVKYVTEGMRKPAFLSGEQKKAIVDLLFKTNRKVTVKQLKEDYFKKIECFDSVEISGVEDRFNASLGTYHDLLKIIKDKDFLDNEENEDILEDIVLTLTLFEDREMIEERLKTYAHLFDDKVMKQLKRRRYTGWGRLSRKLINGIRDKQSGKTILDFLKSDGFANRNFMQLIHDDSLTFKEDIQKAQVSGQGDSLHEHIANLAGSPAIKKGILQTVKVVDELVKVMGRHKPENIVIEMARENQTTQKGQKNSRERMKRIEEGIKELGSQILKEHPVENTQLQNEKLYLYYLQNGRDMYVDQELDINRLSDYDVDHIVPQSFLKDDSIDNKVLTRSDKARGKSDNVPSEEVVKKMKNYWRQLLNAKLITQRKFDNLTKAERGGLSELDKAGFIKRQLVETRQITKHVAQILDSRMNTKYDENDKLIREVKVITLKSKLVSDFRKDFQFYKVREINNYHHAHDAYLNAVVGTALIKKYPKLESEFVYGDYKVYDVRKMIAKSEQEIGKATAKYFFYSNIMNFFKTEITLANGEIRKRPLIETNGETGEIVWDKGRDFATVRKVLSMPQVNIVKKTEVQTGGFSKESILPKRNSDKLIARKKDWDPKKYGGFDSPTVAYSVLVVAKVEKGKSKKLKSVKELLGITIMERSSFEKNPIDFLEAKGYKEVKKDLIIKLPKYSLFELENGRKRMLASAGELQKGNELALPSKYVNFLYLASHYEKLKGSPEDNEQKQLFVEQHKHYLDEIIEQISEFSKRVILADANLDKVLSAYNKHRDKPIREQAENIIHLFTLTNLGAPAAFKYFDTTIDRKRYTSTKEVLDATLIHQSITGLYETRIDLSQLGGDGGGGGEAAAKPAPGGIPWLMKKPLQLTTLVPLQEYEERLLKQTMLTGSYKEKLQSLFLKYDALWQHWENQVGHRRIKPHHIATGTVNPRPQKQYPINPKAKASIQTVINDLLKQGVLIQQNSIMNTPVYPVPKPDGKWRMVLDYREVNKTIPLIAAQNQHSAGILSSIFRGKYKTTLDLSNGFWAHSITPESYWLTAFTWLGQQYCWTRLPQGFLNSPALFNADVVDLLKEVPNVQVYVDDIYISHDDPREHLEQLEKVFSLLLNAGYVVSLKKSEIAQHEVEFLGFNITKEGRGLTETFKQKLLNITPPRDLKQLQSILGLLNFARNFIPNFSELVKPLYNIIATAPGKYITWTTDNSQQLQNIISMLNSAENLEERNPEVRLIMKVNTSPSAGYIRFYNEFAKRPIMYLNYVYTKAEVKFTNTEKLLTTIHKGLIKALDLGMGQEILVYSPIVSMTKIQKTPLPERKALPIRWITWMSYLEDPRIQFHYDKTLPELQQVPTVTDDIIAKIKHPSEFSMVFYTDGSAIKHPNVNKSHNAGMGIAQVQFKPEFTVINTWSIPLGDHTAQLAEVAAVEFACKKALKIDGPVLIVTDSFYVAESVNKELPYWQSNGFFNNKKKPLKHVSKWKSIADCIQLKPDIIIIHEKGHQPTASTFHTEGNNLADKLATQGSYVVNAGKRTADGSEFEKRTADGSEFESPKKKAKVE

SEQ ID NO: 7458 - protein, 2176 aa, synthetic construct
MPAAKRVKLDGGDKKYSIGLDIGTNSVGWAVITDEYKVPSKKFKVLGNTDRHSIKKNLIGALLFDSGETAEATRLKRTARRRYTRRKNRICYLQEIFSNEMAKVDDSFFHRLEESFLVEEDKKHERHPIFGNIVDEVAYHEKYPTIYHLRKKLVDSTDKADLRLIYLALAHMIKFRGHFLIEGDLNPDNSDVDKLFIQLVQTYNQLFEENPINASGVDAKAILSARLSKSRRLENLIAQLPGEKKNGLFGNLIALSLGLTPNFKSNFDLAEDAKLQLSKDTYDDDLDNLLAQIGDQYADLFLAAKNLSDAILLSDILRVNTEITKAPLSASMIKRYDEHHQDLTLLKALVRQQLPEKYKEIFFDQSKNGYAGYIDGGASQEEFYKFIKPILEKMDGTEELLVKLNREDLLRKQRTFDNGSIPHQIHLGELHAILRRQEDFYPFLKDNREKIEKILTFRIPYYVGPLARGNSRFAWMTRKSEETITPWNFEEVVDKGASAQSFIERMTNFDKNLPNEKVLPKHSLLYEYFTVYNELTKVKYVTEGMRKPAFLSGEQKKAIVDLLFKTNRKVTVKQLKEDYFKKIECFDSVEISGVEDRFNASLGTYHDLLKIIKDKDFLDNEENEDILEDIVLTLTLFEDREMIEERLKTYAHLFDDKVMKQLKRRRYTGWGRLSRKLINGIRDKQSGKTILDFLKSDGFANRNFMQLIHDDSLTFKEDIQKAQVSGQGDSLHEHIANLAGSPAIKKGILQTVKVVDELVKVMGRHKPENIVIEMARENQTTQKGQKNSRERMKRIEEGIKELGSQILKEHPVENTQLQNEKLYLYYLQNGRDMYVDQELDINRLSDYDVDHIVPQSFLKDDSIDNKVLTRSDKARGKSDNVPSEEVVKKMKNYWRQLLNAKLITQRKFDNLTKAERGGLSELDKAGFIKRQLVETRQITKHVAQILDSRMNTKYDENDKLIREVKVITLKSKLVSDFRKDFQFYKVREINNYHHAHDAYLNAVVGTALIKKYPKLESEFVYGDYKVYDVRKMIAKSEQEIGKATAKYFFYSNIMNFFKTEITLANGEIRKRPLIETNGETGEIVWDKGRDFATVRKVLSMPQVNIVKKTEVQTGGFSKESILPKRNSDKLIARKKDWDPKKYGGFDSPTVAYSVLVVAKVEKGKSKKLKSVKELLGITIMERSSFEKNPIDFLEAKGYKEVKKDLIIKLPKYSLFELENGRKRMLASAGELQKGNELALPSKYVNFLYLASHYEKLKGSPEDNEQKQLFVEQHKHYLDEIIEQISEFSKRVILADANLDKVLSAYNKHRDKPIREQAENIIHLFTLTNLGAPAAFKYFDTTIDRKRYTSTKEVLDATLIHQSITGLYETRIDLSQLGGDGGGGGEAAAKPAPGGMDPLQLLQPLEAEIKGTKLKAHWNSGATITCVPQAFLEEEVPIKNIWIKTIHGEKEQPVYYLTFKIQGRKVEAEVISSPYDYILVSPSDIPWLMKKPLQLTTLVPLQEYEERLLKQTMLTGSYKEKLQSLFLKYDALWQHWENQVGHRRIKPHHIATGTVNPRPQKQYPINPKAKASIQTVINDLLKQGVLIQQNSIMNTPVYPVPKPDGKWRMVLDYREVNKTIPLIAAQNQHSAGILSSIFRGKYKTTLDLSNGFWAHSITPESYWLTAFTWLGQQYCWTRLPQGFLNSPALFNADVVDLLKEVPNVQVYVDDIYISHDDPREHLEQLEKVFSLLLNAGYVVSLKKSEIAQHEVEFLGFNITKEGRGLTETFKQKLLNITPPRDLKQLQSILGKLNFARNFIPNFSELVKPLYNIIATAPGKYITWTTDNSQQLQNIISMLNSAENLEERNPEVRLIMKVNTSPSAGYIRFYNEFAKRPIMYLNYVYTKAEVKFTNTEKLLTTIHKGLIKALDLGMGQEILVYSPIVSMTKIQKTPLPERKALPIRWITWMSYLEDPRIQFHYDKTLPELQQVPTVTDDIIAKIKHPSEFSMVFYTDGSAIKHPNVNKSHNAGMGIAQVQFKPEFTVINTWSIPLGDHTAQLAEVAAVEFACKKALKIDGPVLIVTDSFYVAESVNKELPYWQSNGFFNNKKKPLKHVSKWKSIADCIQLKPDIIIIHEKGHQPTASTFHTEGNNLADKLATQGSYVVNAGKRTADGSEFEKRTADGSEFESPKKKAKVE

SEQ ID NO: 7459 - protein, 2094 aa, synthetic construct
MPAAKRVKLDGGDKKYSIGLDIGTNSVGWAVITDEYKVPSKKFKVLGNTDRHSIKKNLIGALLFDSGETAEATRLKRTARRRYTRRKNRICYLQEIFSNEMAKVDDSFFHRLEESFLVEEDKKHERHPIFGNIVDEVAYHEKYPTIYHLRKKLVDSTDKADLRLIYLALAHMIKFRGHFLIEGDLNPDNSDVDKLFIQLVQTYNQLFEENPINASGVDAKAILSARLSKSRRLENLIAQLPGEKKNGLFGNLIALSLGLTPNFKSNFDLAEDAKLQLSKDTYDDDLDNLLAQIGDQYADLFLAAKNLSDAILLSDILRVNTEITKAPLSASMIKRYDEHHQDLTLLKALVRQQLPEKYKEIFFDQSKNGYAGYIDGGASQEEFYKFIKPILEKMDGTEELLVKLNREDLLRKQRTFDNGSIPHQIHLGELHAILRRQEDFYPFLKDNREKIEKILTFRIPYYVGPLARGNSRFAWMTRKSEETITPWNFEEVVDKGASAQSFIERMTNFDKNLPNEKVLPKHSLLYEYFTVYNELTKVKYVTEGMRKPAFLSGEQKKAIVDLLFKTNRKVTVKQLKEDYFKKIECFDSVEISGVEDRFNASLGTYHDLLKIIKDKDFLDNEENEDILEDIVLTLTLFEDREMIEERLKTYAHLFDDKVMKQLKRRRYTGWGRLSRKLINGIRDKQSGKTILDFLKSDGFANRNFMQLIHDDSLTFKEDIQKAQVSGQGDSLHEHIANLAGSPAIKKGILQTVKVVDELVKVMGRHKPENIVIEMARENQTTQKGQKNSRERMKRIEEGIKELGSQILKEHPVENTQLQNEKLYLYYLQNGRDMYVDQELDINRLSDYDVDHIVPQSFLKDDSIDNKVLTRSDKARGKSDNVPSEEVVKKMKNYWRQLLNAKLITQRKFDNLTKAERGGLSELDKAGFIKRQLVETRQITKHVAQILDSRMNTKYDENDKLIREVKVITLKSKLVSDFRKDFQFYKVREINNYHHAHDAYLNAVVGTALIKKYPKLESEFVYGDYKVYDVRKMIAKSEQEIGKATAKYFFYSNIMNFFKTEITLANGEIRKRPLIETNGETGEIVWDKGRDFATVRKVLSMPQVNIVKKTEVQTGGFSKESILPKRNSDKLIARKKDWDPKKYGGFDSPTVAYSVLVVAKVEKGKSKKLKSVKELLGITIMERSSFEKNPIDFLEAKGYKEVKKDLIIKLPKYSLFELENGRKRMLASAGELQKGNELALPSKYVNFLYLASHYEKLKGSPEDNEQKQLFVEQHKHYLDEIIEQISEFSKRVILADANLDKVLSAYNKHRDKPIREQAENIIHLFTLTNLGAPAAFKYFDTTIDRKRYTSTKEVLDATLIHQSITGLYETRIDLSQLGGDGGGGGEAAAKPAPGGVLNLEEEYRLHEKPVPSSIDPSWLQLFPTVWAERAGMGLANQVPPVVVELRSGASPVAVRQYPMSKEAREGIRPHIQRFLDLGVLVPCQSPWNTPLLPVKKPGTNDYRPVQDLREINKRVQDIHPTVPNPYNLLSSLPPSHTWYSVLDLKDAFFCLKLHPNSQPLFAFEWRDPEKGNTGQLTWTRLPQGFKNSPTLFNEALHRDLAPFRALNPQVVLLQYVDDLLVAAPTYRDCKEGTQKLLQELSKLGYRVSAKKAQLCQKEVTYLGYLLKEGKRWLTPARKATVMKIPPPTTPRQVREFLGTAGFCRLWIPGFASLAAPLYPLTKPSIPFIWTEEHQKAFDRIKEALLSAPALALPDLTKPFTLYVDERAGVARGVLTQTLGPWRRPVAYLSKKLDPVASGWPTCLKAVAAVALLLKDADKLTLGQNVTVIASHSLESIVRQPPDRWMTNARMTHYQSLLLNERVSFAPPAVLNPATLLPVESEATPVHRCSEILAEETGTRRDLKDQPLPGVPAWYTDGSSFIAEGKRRAGAAIVDGKRTVWASSLPEGTSAQKAELVALTQALRLAEGKDINIYTDSRYAFATAHIHGAIYKQRGWLTSAGKDIKNKEEILALLEAIHLPKRVAIIHCPGHQKGNDPVATGNRRADEAAKQAALSTRVLAETTKPAGKRTADGSEFEKRTADGSEFESPKKKAKVE

SEQ ID NO: 7460 - protein, 2096 aa, synthetic construct
MPAAKRVKLDGGDKKYSIGLDIGTNSVGWAVITDEYKVPSKKFKVLGNTDRHSIKKNLIGALLFDSGETAEATRLKRTARRRYTRRKNRICYLQEIFSNEMAKVDDSFFHRLEESFLVEEDKKHERHPIFGNIVDEVAYHEKYPTIYHLRKKLVDSTDKADLRLIYLALAHMIKFRGHFLIEGDLNPDNSDVDKLFIQLVQTYNQLFEENPINASGVDAKAILSARLSKSRRLENLIAQLPGEKKNGLFGNLIALSLGLTPNFKSNFDLAEDAKLQLSKDTYDDDLDNLLAQIGDQYADLFLAAKNLSDAILLSDILRVNTEITKAPLSASMIKRYDEHHQDLTLLKALVRQQLPEKYKEIFFDQSKNGYAGYIDGGASQEEFYKFIKPILEKMDGTEELLVKLNREDLLRKQRTFDNGSIPHQIHLGELHAILRRQEDFYPFLKDNREKIEKILTFRIPYYVGPLARGNSRFAWMTRKSEETITPWNFEEVVDKGASAQSFIERMTNFDKNLPNEKVLPKHSLLYEYFTVYNELTKVKYVTEGMRKPAFLSGEQKKAIVDLLFKTNRKVTVKQLKEDYFKKIECFDSVEISGVEDRFNASLGTYHDLLKIIKDKDFLDNEENEDILEDIVLTLTLFEDREMIEERLKTYAHLFDDKVMKQLKRRRYTGWGRLSRKLINGIRDKQSGKTILDFLKSDGFANRNFMQLIHDDSLTFKEDIQKAQVSGQGDSLHEHIANLAGSPAIKKGILQTVKVVDELVKVMGRHKPENIVIEMARENQTTQKGQKNSRERMKRIEEGIKELGSQILKEHPVENTQLQNEKLYLYYLQNGRDMYVDQELDINRLSDYDVDHIVPQSFLKDDSIDNKVLTRSDKARGKSDNVPSEEVVKKMKNYWRQLLNAKLITQRKFDNLTKAERGGLSELDKAGFIKRQLVETRQITKHVAQILDSRMNTKYDENDKLIREVKVITLKSKLVSDFRKDFQFYKVREINNYHHAHDAYLNAVVGTALIKKYPKLESEFVYGDYKVYDVRKMIAKSEQEIGKATAKYFFYSNIMNFFKTEITLANGEIRKRPLIETNGETGEIVWDKGRDFATVRKVLSMPQVNIVKKTEVQTGGFSKESILPKRNSDKLIARKKDWDPKKYGGFDSPTVAYSVLVVAKVEKGKSKKLKSVKELLGITIMERSSFEKNPIDFLEAKGYKEVKKDLIIKLPKYSLFELENGRKRMLASAGELQKGNELALPSKYVNFLYLASHYEKLKGSPEDNEQKQLFVEQHKHYLDEIIEQISEFSKRVILADANLDKVLSAYNKHRDKPIREQAENIIHLFTLTNLGAPAAFKYFDTTIDRKRYTSTKEVLDATLIHQSITGLYETRIDLSQLGGDGGGGGEAAAKPAPGGTLNIEDEYRLHETSKEPDVPLGSTWLSDFPQAWAETGGMGLAVRQAPLIIPLKATSTPVSIKQYPMSQEARLGIKPHIQRLLDQGILVPCQSPWNTPLLPVKKPGTNDYRPVQDLREVNKRVEDIHPTVPNPYNLLSGLPPSHQWYTVLDLKDAFFCLRLHPTSQPLFAFEWRDPEMGISGQLTWTRLPQGFKNSPTLFDEALHRDLADFRIQHPDLILLQYVDDLLLAATSEQDCQRGTRALLQTLGNLGYRASAKKAQICQKQVKYLGYLLKEGQRWLTEARKETVMGQPTPKTPRQLREFLGTAGFCRLWIPGFAEMAAPLYPLTKTGTLFNWGPDQQKAYQEIKQALLTAPALGLPDLTKPFELFVDEKQGYAKGVLTQKLGPWRRPVAYLSKKLDPVAAGWPPCLRMVAAIAVLTKDAGKLTMGQPLVILAPHAVEALVKQPPDRWLSNARMTHYQAMLLDTDRVQFGPVVALNPATLLPLPEKEAPHDCLEILAETHGTRPDLTDQPIPDADYTWYTDGSSFLQEGQRRAGAAVTTETEVIWARALPAGTSAQRAELIALTQALKMAEGKKLNVYTDSRYAFATAHVHGEIYRRRGLLTSEGREIKNKNEILALLKALFLPKRLSIIHCPGHQKGNSAEARGNRMADQAAREAAMKAVLETSTLLAGKRTADGSEFEKRTADGSEFESPKKKAKVE

SEQ ID NO: 7461 - protein, 2096 aa, synthetic construct
MPAAKRVKLDGGDKKYSIGLDIGTNSVGWAVITDEYKVPSKKFKVLGNTDRHSIKKNLIGALLFDSGETAEATRLKRTARRRYTRRKNRICYLQEIFSNEMAKVDDSFFHRLEESFLVEEDKKHERHPIFGNIVDEVAYHEKYPTIYHLRKKLVDSTDKADLRLIYLALAHMIKFRGHFLIEGDLNPDNSDVDKLFIQLVQTYNQLFEENPINASGVDAKAILSARLSKSRRLENLIAQLPGEKKNGLFGNLIALSLGLTPNFKSNFDLAEDAKLQLSKDTYDDDLDNLLAQIGDQYADLFLAAKNLSDAILLSDILRVNTEITKAPLSASMIKRYDEHHQDLTLLKALVRQQLPEKYKEIFFDQSKNGYAGYIDGGASQEEFYKFIKPILEKMDGTEELLVKLNREDLLRKQRTFDNGSIPHQIHLGELHAILRRQEDFYPFLKDNREKIEKILTFRIPYYVGPLARGNSRFAWMTRKSEETITPWNFEEVVDKGASAQSFIERMTNFDKNLPNEKVLPKHSLLYEYFTVYNELTKVKYVTEGMRKPAFLSGEQKKAIVDLLFKTNRKVTVKQLKEDYFKKIECFDSVEISGVEDRFNASLGTYHDLLKIIKDKDFLDNEENEDILEDIVLTLTLFEDREMIEERLKTYAHLFDDKVMKQLKRRRYTGWGRLSRKLINGIRDKQSGKTILDFLKSDGFANRNFMQLIHDDSLTFKEDIQKAQVSGQGDSLHEHIANLAGSPAIKKGILQTVKVVDELVKVMGRHKPENIVIEMARENQTTQKGQKNSRERMKRIEEGIKELGSQILKEHPVENTQLQNEKLYLYYLQNGRDMYVDQELDINRLSDYDVDHIVPQSFLKDDSIDNKVLTRSDKARGKSDNVPSEEVVKKMKNYWRQLLNAKLITQRKFDNLTKAERGGLSELDKAGFIKRQLVETRQITKHVAQILDSRMNTKYDENDKLIREVKVITLKSKLVSDFRKDFQFYKVREINNYHHAHDAYLNAVVGTALIKKYPKLESEFVYGDYKVYDVRKMIAKSEQEIGKATAKYFFYSNIMNFFKTEITLANGEIRKRPLIETNGETGEIVWDKGRDFATVRKVLSMPQVNIVKKTEVQTGGFSKESILPKRNSDKLIARKKDWDPKKYGGFDSPTVAYSVLVVAKVEKGKSKKLKSVKELLGITIMERSSFEKNPIDFLEAKGYKEVKKDLIIKLPKYSLFELENGRKRMLASAGELQKGNELALPSKYVNFLYLASHYEKLKGSPEDNEQKQLFVEQHKHYLDEIIEQISEFSKRVILADANLDKVLSAYNKHRDKPIREQAENIIHLFTLTNLGAPAAFKYFDTTIDRKRYTSTKEVLDATLIHQSITGLYETRIDLSQLGGDGGGGGEAAAKPAPGGTLNIEDEYRLHETSKEPDVPLGSTWLSDFPQAWAETGGMGLAVRQAPLIIPLKATSTPVSIKQYPMSQEARLGIKPHIQRLLDQGILVPCQSPWNTPLLPVKKPGTNDYRPVQDLREVNKRVEDIHPTVPNPYNLLSGLPPSHQWYTVLDLKDAFFCLRLHPTSQPLFAFEWRDPEMGISGQLTWTRLPQGFKNSPTLFNEALHRDLADFRIQHPDLILLQYVDDLLLAATSEQDCQRGTRALLQTLGNLGYRASAKKAQICQKQVKYLGYLLKEGQRWLTEARKETVMGQPTPKTPRQLREFLGKAGFCRLFIPGFAEMAAPLYPLTKPGTLFNWGPDQQKAYQEIKQALLTAPALGLPDLTKPFELFVDEKQGYAKGVLTQKLGPWRRPVAYLSKKLDPVAAGWPPCLRMVAAIAVLTKDAGKLTMGQPLVILAPHAVEALVKQPPDRWLSNARMTHYQAMLLDTDRVQFGPVVALNPATLLPLPEKEAPHDCLEILAETHGTRPDLTDQPIPDADYTWYTDGSSFLQEGQRRAGAAVTTETEVIWARALPAGTSAQRAELIALTQALKMAEGKKLNVYTDSRYAFATAHVHGEIYRRRGWLTSEGREIKNKNEILALLKALFLPKRLSIIHCPGHQKGNSAEARGNRMADQAAREAAMKAVLETSTLLAGKRTADGSEFEKRTADGSEFESPKKKAKVE

SEQ ID NO: 7462 - protein, 2098 aa, synthetic construct
MPAAKRVKLDGGDKKYSIGLDIGTNSVGWAVITDEYKVPSKKFKVLGNTDRHSIKKNLIGALLFDSGETAEATRLKRTARRRYTRRKNRICYLQEIFSNEMAKVDDSFFHRLEESFLVEEDKKHERHPIFGNIVDEVAYHEKYPTIYHLRKKLVDSTDKADLRLIYLALAHMIKFRGHFLIEGDLNPDNSDVDKLFIQLVQTYNQLFEENPINASGVDAKAILSARLSKSRRLENLIAQLPGEKKNGLFGNLIALSLGLTPNFKSNFDLAEDAKLQLSKDTYDDDLDNLLAQIGDQYADLFLAAKNLSDAILLSDILRVNTEITKAPLSASMIKRYDEHHQDLTLLKALVRQQLPEKYKEIFFDQSKNGYAGYIDGGASQEEFYKFIKPILEKMDGTEELLVKLNREDLLRKQRTFDNGSIPHQIHLGELHAILRRQEDFYPFLKDNREKIEKILTFRIPYYVGPLARGNSRFAWMTRKSEETITPWNFEEVVDKGASAQSFIERMTNFDKNLPNEKVLPKHSLLYEYFTVYNELTKVKYVTEGMRKPAFLSGEQKKAIVDLLFKTNRKVTVKQLKEDYFKKIECFDSVEISGVEDRFNASLGTYHDLLKIIKDKDFLDNEENEDILEDIVLTLTLFEDREMIEERLKTYAHLFDDKVMKQLKRRRYTGWGRLSRKLINGIRDKQSGKTILDFLKSDGFANRNFMQLIHDDSLTFKEDIQKAQVSGQGDSLHEHIANLAGSPAIKKGILQTVKVVDELVKVMGRHKPENIVIEMARENQTTQKGQKNSRERMKRIEEGIKELGSQILKEHPVENTQLQNEKLYLYYLQNGRDMYVDQELDINRLSDYDVDHIVPQSFLKDDSIDNKVLTRSDKARGKSDNVPSEEVVKKMKNYWRQLLNAKLITQRKFDNLTKAERGGLSELDKAGFIKRQLVETRQITKHVAQILDSRMNTKYDENDKLIREVKVITLKSKLVSDFRKDFQFYKVREINNYHHAHDAYLNAVVGTALIKKYPKLESEFVYGDYKVYDVRKMIAKSEQEIGKATAKYFFYSNIMNFFKTEITLANGEIRKRPLIETNGETGEIVWDKGRDFATVRKVLSMPQVNIVKKTEVQTGGFSKESILPKRNSDKLIARKKDWDPKKYGGFDSPTVAYSVLVVAKVEKGKSKKLKSVKELLGITIMERSSFEKNPIDFLEAKGYKEVKKDLIIKLPKYSLFELENGRKRMLASAGELQKGNELALPSKYVNFLYLASHYEKLKGSPEDNEQKQLFVEQHKHYLDEIIEQISEFSKRVILADANLDKVLSAYNKHRDKPIREQAENIIHLFTLTNLGAPAAFKYFDTTIDRKRYTSTKEVLDATLIHQSITGLYETRIDLSQLGGDGGGGGPAPEAAAKGGTAPLEEEYRLFLEAPIQNVTLLEQWKREIPKVWAEINPPGLASTQAPIHVQLLSTALPVRVRQYPITLEAKRSLRETIRKFRAAGILRPVHSPWNTPLLPVRKSGTSEYRMVQDLREVNKRVETIHPTVPNPYTLLSLLPPDRIWYSVLDLKDAFFCIPLAPESQLIFAFEWADAEEGESGQLTWTRLPQGFKNSPTLFNEALNRDLQGFRLDHPSVSLLQYVDDLLIAADTQAACLSATRDLLMTLAELGYRVSGKKAQLCQEEVTYLGFKIHKGSRSLSNSRTQAILQIPVPKTKRQVREFLGTIGYCRLWIPGFAELAQPLYAATRPGNDPLVWGEKEEEAFQSLKLALTQPPALALPSLDKPFQLFVEETSGAAKGVLTQALGPWKRPVAYLSKRLDPVAAGWPRCLRAIAAAALLTREASKLTFGQDIEITSSHNLESLLRSPPDKWLTNARITQYQVLLLDPPRVRFKQTAALNPATLLPETDDTLPIHHCLDTLDSLTSTRPDLTDQPLAQAEATLFTDGSSYIRDGKRYAGAAVVTLDSVIWAEPLPIGTSAQKAELIALTKALEWSKDKSVNIYTDSRYAFATLHVHGMIYRERGWLTAGGKAIKNAPEILALLTAVWLPKRVAVMHCKGHQKDDAPTSTGNRRADEVAREVAIRPLSTQATISAGKRTADGSEFEKRTADGSEFESPKKKAKVE

SEQ ID NO: 7463 - protein, 2102 aa, synthetic construct
MPAAKRVKLDGGDKKYSIGLDIGTNSVGWAVITDEYKVPSKKFKVLGNTDRHSIKKNLIGALLFDSGETAEATRLKRTARRRYTRRKNRICYLQEIFSNEMAKVDDSFFHRLEESFLVEEDKKHERHPIFGNIVDEVAYHEKYPTIYHLRKKLVDSTDKADLRLIYLALAHMIKFRGHFLIEGDLNPDNSDVDKLFIQLVQTYNQLFEENPINASGVDAKAILSARLSKSRRLENLIAQLPGEKKNGLFGNLIALSLGLTPNFKSNFDLAEDAKLQLSKDTYDDDLDNLLAQIGDQYADLFLAAKNLSDAILLSDILRVNTEITKAPLSASMIKRYDEHHQDLTLLKALVRQQLPEKYKEIFFDQSKNGYAGYIDGGASQEEFYKFIKPILEKMDGTEELLVKLNREDLLRKQRTFDNGSIPHQIHLGELHAILRRQEDFYPFLKDNREKIEKILTFRIPYYVGPLARGNSRFAWMTRKSEETITPWNFEEVVDKGASAQSFIERMTNFDKNLPNEKVLPKHSLLYEYFTVYNELTKVKYVTEGMRKPAFLSGEQKKAIVDLLFKTNRKVTVKQLKEDYFKKIECFDSVEISGVEDRFNASLGTYHDLLKIIKDKDFLDNEENEDILEDIVLTLTLFEDREMIEERLKTYAHLFDDKVMKQLKRRRYTGWGRLSRKLINGIRDKQSGKTILDFLKSDGFANRNFMQLIHDDSLTFKEDIQKAQVSGQGDSLHEHIANLAGSPAIKKGILQTVKVVDELVKVMGRHKPENIVIEMARENQTTQKGQKNSRERMKRIEEGIKELGSQILKEHPVENTQLQNEKLYLYYLQNGRDMYVDQELDINRLSDYDVDHIVPQSFLKDDSIDNKVLTRSDKARGKSDNVPSEEVVKKMKNYWRQLLNAKLITQRKFDNLTKAERGGLSELDKAGFIKRQLVETRQITKHVAQILDSRMNTKYDENDKLIREVKVITLKSKLVSDFRKDFQFYKVREINNYHHAHDAYLNAVVGTALIKKYPKLESEFVYGDYKVYDVRKMIAKSEQEIGKATAKYFFYSNIMNFFKTEITLANGEIRKRPLIETNGETGEIVWDKGRDFATVRKVLSMPQVNIVKKTEVQTGGFSKESILPKRNSDKLIARKKDWDPKKYGGFDSPTVAYSVLVVAKVEKGKSKKLKSVKELLGITIMERSSFEKNPIDFLEAKGYKEVKKDLIIKLPKYSLFELENGRKRMLASAGELQKGNELALPSKYVNFLYLASHYEKLKGSPEDNEQKQLFVEQHKHYLDEIIEQISEFSKRVILADANLDKVLSAYNKHRDKPIREQAENIIHLFTLTNLGAPAAFKYFDTTIDRKRYTSTKEVLDATLIHQSITGLYETRIDLSQLGGDGGGGGPAPEAAAKGGTVSLQDEHRLFDIPVTTSLPDVWLQDFPQAWAETGGLGRAKCQAPIIIDLKPTAVPVSIKQYPMSLEAHMGIRQHIIKFLELGVLRPCRSPWNTPLLPVKKPGTQDYRPVQDLREINKRTVDIHPTVPNPYNLLSTLKPDYSWYTVLDLKDAFFCLPLAPQSQELFAFEWKDPERGISGQLTWTRLPQGFKNSPTLFNEALHRDLTDFRTQHPEVTLLQYVDDLLLAAPTKKACTQGTRHLLQELGEKGYRASAKKAQICQTKVTYLGYILSEGKRWLTPGRIETVARIPPPRNPREVREFLGTAGFCRLWIPGFAELAAPLYALTKPSTPFTWQTEHQLAFEALKKALLSAPALGLPDTSKPFTLFLDERQGIAKGVLTQKLGPWKRPVAYLSKKLDPVAAGWPPCLRIMAATAMLVKDSAKLTLGQPLTVITPHTLEAIVRQPPDRWITNARLTHYQALLLDTDRVQFGPPVTLNPATLLPVPENQPSPHDCRQVLAETHGTREDLKDQELPDADHTWYTDGSSYLDSGTRRAGAAVVDGHNTIWAQSLPPGTSAQKAELIALTKALELSKGKKANIYTDSRYAFATAHTHGSIYERRGWLTSEGKEIKNKAEIIALLKALFLPQEVAIIHCPGHQKGQDPVAVGNRQADRVARQAAMAEVLTLATEPDNTSHITAGKRTADGSEFEKRTADGSEFESPKKKAKVE

SEQ ID NO: 7464 - protein, 2173 aa, synthetic construct
MPAAKRVKLDGGDKKYSIGLDIGTNSVGWAVITDEYKVPSKKFKVLGNTDRHSIKKNLIGALLFDSGETAEATRLKRTARRRYTRRKNRICYLQEIFSNEMAKVDDSFFHRLEESFLVEEDKKHERHPIFGNIVDEVAYHEKYPTIYHLRKKLVDSTDKADLRLIYLALAHMIKFRGHFLIEGDLNPDNSDVDKLFIQLVQTYNQLFEENPINASGVDAKAILSARLSKSRRLENLIAQLPGEKKNGLFGNLIALSLGLTPNFKSNFDLAEDAKLQLSKDTYDDDLDNLLAQIGDQYADLFLAAKNLSDAILLSDILRVNTEITKAPLSASMIKRYDEHHQDLTLLKALVRQQLPEKYKEIFFDQSKNGYAGYIDGGASQEEFYKFIKPILEKMDGTEELLVKLNREDLLRKQRTFDNGSIPHQIHLGELHAILRRQEDFYPFLKDNREKIEKILTFRIPYYVGPLARGNSRFAWMTRKSEETITPWNFEEVVDKGASAQSFIERMTNFDKNLPNEKVLPKHSLLYEYFTVYNELTKVKYVTEGMRKPAFLSGEQKKAIVDLLFKTNRKVTVKQLKEDYFKKIECFDSVEISGVEDRFNASLGTYHDLLKIIKDKDFLDNEENEDILEDIVLTLTLFEDREMIEERLKTYAHLFDDKVMKQLKRRRYTGWGRLSRKLINGIRDKQSGKTILDFLKSDGFANRNFMQLIHDDSLTFKEDIQKAQVSGQGDSLHEHIANLAGSPAIKKGILQTVKVVDELVKVMGRHKPENIVIEMARENQTTQKGQKNSRERMKRIEEGIKELGSQILKEHPVENTQLQNEKLYLYYLQNGRDMYVDQELDINRLSDYDVDHIVPQSFLKDDSIDNKVLTRSDKARGKSDNVPSEEVVKKMKNYWRQLLNAKLITQRKFDNLTKAERGGLSELDKAGFIKRQLVETRQITKHVAQILDSRMNTKYDENDKLIREVKVITLKSKLVSDFRKDFQFYKVREINNYHHAHDAYLNAVVGTALIKKYPKLESEFVYGDYKVYDVRKMIAKSEQEIGKATAKYFFYSNIMNFFKTEITLANGEIRKRPLIETNGETGEIVWDKGRDFATVRKVLSMPQVNIVKKTEVQTGGFSKESILPKRNSDKLIARKKDWDPKKYGGFDSPTVAYSVLVVAKVEKGKSKKLKSVKELLGITIMERSSFEKNPIDFLEAKGYKEVKKDLIIKLPKYSLFELENGRKRMLASAGELQKGNELALPSKYVNFLYLASHYEKLKGSPEDNEQKQLFVEQHKHYLDEIIEQISEFSKRVILADANLDKVLSAYNKHRDKPIREQAENIIHLFTLTNLGAPAAFKYFDTTIDRKRYTSTKEVLDATLIHQSITGLYETRIDLSQLGGDGGGGGPAPEAAAKGGMDLLKPLTVERKGVKIKGYWNSQADITCVPKDLLQGEEPVRQQNVTTIHGTQEGDVYYVNLKIDGRRINTEVIGTTLDYAIITPGDVPWILKKPLELTIKLDLEEQQGTLLNNSILSKKGKEELKQLFEKYSALWQSWENQVGHRRIRPHKIATGTVKPTPQKQYHINPKAKPDIQIVINDLLKQGVLIQKESTMNTPVYPVPKPNGRWRMVLDYRAVNKVTPLIAVQNQHSYGILGSLFKGRYKTTIDLSNGFWAHPIVPEDYWITAFTWQGKQYCWTVLPQGFLNSPGLFTGDVVDLLQGIPNVEVYVDDVYISHDSEKEHLEYLDILFNRLKEAGYIISLKKSNIANSIVDFLGFQITNEGRGLTDTFKEKLENITAPTTLKQLQSILGLLNFARNFIPDFTELIAPLYALIPKSTKNYVPWQIEHSTTLETLITKLNGAEYLQGRKGDKTLIMKVNASYTTGYIRYYNEGEKKPISYVSIVFSKTELKFTELEKLLTTVHKGLLKALDLSMGQNIHVYSPIVSMQNIQKTPQTAKKALASRWLSWLSYLEDPRIRFFYDPQMPALKDLPAVDTGKDNKKHPSNFQHIFYTDGSAITSPTKEGHLNAGMGIVYFINKDGNLQKQQEWSISLGNHTAQFAEIAAFEFALKKCLPLGGNILVVTDSNYVAKAYNEELDVWASNGFVNNRKKPLKHISKWKSVADLKRLRPDVVVTHEPGHQKLDSSPHAYGNNLADQLATQASFKVHAGKRTADGSEFEKRTADGSEFESPKKKAKVE

SEQ ID NO: 7465 - protein, 2087 aa, synthetic construct
MPAAKRVKLDGGDKKYSIGLDIGTNSVGWAVITDEYKVPSKKFKVLGNTDRHSIKKNLIGALLFDSGETAEATRLKRTARRRYTRRKNRICYLQEIFSNEMAKVDDSFFHRLEESFLVEEDKKHERHPIFGNIVDEVAYHEKYPTIYHLRKKLVDSTDKADLRLIYLALAHMIKFRGHFLIEGDLNPDNSDVDKLFIQLVQTYNQLFEENPINASGVDAKAILSARLSKSRRLENLIAQLPGEKKNGLFGNLIALSLGLTPNFKSNFDLAEDAKLQLSKDTYDDDLDNLLAQIGDQYADLFLAAKNLSDAILLSDILRVNTEITKAPLSASMIKRYDEHHQDLTLLKALVRQQLPEKYKEIFFDQSKNGYAGYIDGGASQEEFYKFIKPILEKMDGTEELLVKLNREDLLRKQRTFDNGSIPHQIHLGELHAILRRQEDFYPFLKDNREKIEKILTFRIPYYVGPLARGNSRFAWMTRKSEETITPWNFEEVVDKGASAQSFIERMTNFDKNLPNEKVLPKHSLLYEYFTVYNELTKVKYVTEGMRKPAFLSGEQKKAIVDLLFKTNRKVTVKQLKEDYFKKIECFDSVEISGVEDRFNASLGTYHDLLKIIKDKDFLDNEENEDILEDIVLTLTLFEDREMIEERLKTYAHLFDDKVMKQLKRRRYTGWGRLSRKLINGIRDKQSGKTILDFLKSDGFANRNFMQLIHDDSLTFKEDIQKAQVSGQGDSLHEHIANLAGSPAIKKGILQTVKVVDELVKVMGRHKPENIVIEMARENQTTQKGQKNSRERMKRIEEGIKELGSQILKEHPVENTQLQNEKLYLYYLQNGRDMYVDQELDINRLSDYDVDHIVPQSFLKDDSIDNKVLTRSDKARGKSDNVPSEEVVKKMKNYWRQLLNAKLITQRKFDNLTKAERGGLSELDKAGFIKRQLVETRQITKHVAQILDSRMNTKYDENDKLIREVKVITLKSKLVSDFRKDFQFYKVREINNYHHAHDAYLNAVVGTALIKKYPKLESEFVYGDYKVYDVRKMIAKSEQEIGKATAKYFFYSNIMNFFKTEITLANGEIRKRPLIETNGETGEIVWDKGRDFATVRKVLSMPQVNIVKKTEVQTGGFSKESILPKRNSDKLIARKKDWDPKKYGGFDSPTVAYSVLVVAKVEKGKSKKLKSVKELLGITIMERSSFEKNPIDFLEAKGYKEVKKDLIIKLPKYSLFELENGRKRMLASAGELQKGNELALPSKYVNFLYLASHYEKLKGSPEDNEQKQLFVEQHKHYLDEIIEQISEFSKRVILADANLDKVLSAYNKHRDKPIREQAENIIHLFTLTNLGAPAAFKYFDTTIDRKRYTSTKEVLDATLIHQSITGLYETRIDLSQLGGDGGGGGPAPEAAAKGGVPWILKKPLELTIKLDLEEQQGTLLNNSILSKKGKEELKQLFEKYSALWQSWENQVGHRRIRPHKIATGTVKPTPQKQYHINPKAKPDIQIVINDLLKQGVLIQKESTMNTPVYPVPKPNGRWRMVLDYRAVNKVTPLIAVQNQHSYGILGSLFKGRYKTTIDLSNGFWAHPIVPEDYWITAFTWQGKQYCWTVLPQGFLNSPGLFNGDVVDLLQGIPNVEVYVDDVYISHDSEKEHLEYLDILFNRLKEAGYIISLKKSNIANSIVDFLGFQITNEGRGLTDTFKEKLENITAPTTLKQLQSILGLLNFARNFIPDFTELIAPLYALIPKSPKNYVPWQIEHSTTLETLITKLNGAEYLQGRKGDKTLIMKVNASYTTGYIRYYNEGEKKPISYVSIVFSKTELKFTELEKLLTTVHKGLLKALDLSMGQNIHVYSPIVSMQNIQKTPQTAKKALASRWLSWLSYLEDPRIRFFYDPQMPALKDLPAVDTGKDNKKHPSNFQHIFYTDGSAITSPTKEGHLNAGMGIVYFINKDGNLQKQQEWSISLGNHTAQFAEIAAFEFALKKCLPLGGNILVVTDSNYVAKAYNEELDVWASNGFVNNRKKPLKHISKWKSVADLKRLRPDVVVTHEPGHQKLDSSPHAYGNNLADQLATQASFKVHAGKRTADGSEFEKRTADGSEFESPKKKAKVE

SEQ ID NO: 7466 - protein, 2173 aa, synthetic construct
MPAAKRVKLDGGDKKYSIGLDIGTNSVGWAVITDEYKVPSKKFKVLGNTDRHSIKKNLIGALLFDSGETAEATRLKRTARRRYTRRKNRICYLQEIFSNEMAKVDDSFFHRLEESFLVEEDKKHERHPIFGNIVDEVAYHEKYPTIYHLRKKLVDSTDKADLRLIYLALAHMIKFRGHFLIEGDLNPDNSDVDKLFIQLVQTYNQLFEENPINASGVDAKAILSARLSKSRRLENLIAQLPGEKKNGLFGNLIALSLGLTPNFKSNFDLAEDAKLQLSKDTYDDDLDNLLAQIGDQYADLFLAAKNLSDAILLSDILRVNTEITKAPLSASMIKRYDEHHQDLTLLKALVRQQLPEKYKEIFFDQSKNGYAGYIDGGASQEEFYKFIKPILEKMDGTEELLVKLNREDLLRKQRTFDNGSIPHQIHLGELHAILRRQEDFYPFLKDNREKIEKILTFRIPYYVGPLARGNSRFAWMTRKSEETITPWNFEEVVDKGASAQSFIERMTNFDKNLPNEKVLPKHSLLYEYFTVYNELTKVKYVTEGMRKPAFLSGEQKKAIVDLLFKTNRKVTVKQLKEDYFKKIECFDSVEISGVEDRFNASLGTYHDLLKIIKDKDFLDNEENEDILEDIVLTLTLFEDREMIEERLKTYAHLFDDKVMKQLKRRRYTGWGRLSRKLINGIRDKQSGKTILDFLKSDGFANRNFMQLIHDDSLTFKEDIQKAQVSGQGDSLHEHIANLAGSPAIKKGILQTVKVVDELVKVMGRHKPENIVIEMARENQTTQKGQKNSRERMKRIEEGIKELGSQILKEHPVENTQLQNEKLYLYYLQNGRDMYVDQELDINRLSDYDVDHIVPQSFLKDDSIDNKVLTRSDKARGKSDNVPSEEVVKKMKNYWRQLLNAKLITQRKFDNLTKAERGGLSELDKAGFIKRQLVETRQITKHVAQILDSRMNTKYDENDKLIREVKVITLKSKLVSDFRKDFQFYKVREINNYHHAHDAYLNAVVGTALIKKYPKLESEFVYGDYKVYDVRKMIAKSEQEIGKATAKYFFYSNIMNFFKTEITLANGEIRKRPLIETNGETGEIVWDKGRDFATVRKVLSMPQVNIVKKTEVQTGGFSKESILPKRNSDKLIARKKDWDPKKYGGFDSPTVAYSVLVVAKVEKGKSKKLKSVKELLGITIMERSSFEKNPIDFLEAKGYKEVKKDLIIKLPKYSLFELENGRKRMLASAGELQKGNELALPSKYVNFLYLASHYEKLKGSPEDNEQKQLFVEQHKHYLDEIIEQISEFSKRVILADANLDKVLSAYNKHRDKPIREQAENIIHLFTLTNLGAPAAFKYFDTTIDRKRYTSTKEVLDATLIHQSITGLYETRIDLSQLGGDGGGGGPAPEAAAKGGMDLLKPLTVERKGVKIKGYWNSQADITCVPKDLLQGEEPVRQQNVTTIHGTQEGDVYYVNLKIDGRRINTEVIGTTLDYAIITPGDVPWILKKPLELTIKLDLEEQQGTLLNNSILSKKGKEELKQLFEKYSALWQSWENQVGHRRIRPHKIATGTVKPTPQKQYHINPKAKPDIQIVINDLLKQGVLIQKESTMNTPVYPVPKPNGRWRMVLDYRAVNKVTPLIAVQNQHSYGILGSLFKGRYKTTIDLSNGFWAHPIVPEDYWITAFTWQGKQYCWTVLPQGFLNSPGLFNGDVVDLLQGIPNVEVYVDDVYISHDSEKEHLEYLDILFNRLKEAGYIISLKKSNIANSIVDFLGFQITNEGRGLTDTFKEKLENITAPTTLKQLQSILGLLNFARNFIPDFTELIAPLYALIPKSPKNYVPWQIEHSTTLETLITKLNGAEYLQGRKGDKTLIMKVNASYTTGYIRYYNEGEKKPISYVSIVFSKTELKFTELEKLLTTVHKGLLKALDLSMGQNIHVYSPIVSMQNIQKTPQTAKKALASRWLSWLSYLEDPRIRFFYDPQMPALKDLPAVDTGKDNKKHPSNFQHIFYTDGSAITSPTKEGHLNAGMGIVYFINKDGNLQKQQEWSISLGNHTAQFAEIAAFEFALKKCLPLGGNILVVTDSNYVAKAYNEELDVWASNGFVNNRKKPLKHISKWKSVADLKRLRPDVVVTHEPGHQKLDSSPHAYGNNLADQLATQASFKVHAGKRTADGSEFEKRTADGSEFESPKKKAKVE

SEQ ID NO: 7467 - protein, 2094 aa, synthetic construct
MPAAKRVKLDGGDKKYSIGLDIGTNSVGWAVITDEYKVPSKKFKVLGNTDRHSIKKNLIGALLFDSGETAEATRLKRTARRRYTRRKNRICYLQEIFSNEMAKVDDSFFHRLEESFLVEEDKKHERHPIFGNIVDEVAYHEKYPTIYHLRKKLVDSTDKADLRLIYLALAHMIKFRGHFLIEGDLNPDNSDVDKLFIQLVQTYNQLFEENPINASGVDAKAILSARLSKSRRLENLIAQLPGEKKNGLFGNLIALSLGLTPNFKSNFDLAEDAKLQLSKDTYDDDLDNLLAQIGDQYADLFLAAKNLSDAILLSDILRVNTEITKAPLSASMIKRYDEHHQDLTLLKALVRQQLPEKYKEIFFDQSKNGYAGYIDGGASQEEFYKFIKPILEKMDGTEELLVKLNREDLLRKQRTFDNGSIPHQIHLGELHAILRRQEDFYPFLKDNREKIEKILTFRIPYYVGPLARGNSRFAWMTRKSEETITPWNFEEVVDKGASAQSFIERMTNFDKNLPNEKVLPKHSLLYEYFTVYNELTKVKYVTEGMRKPAFLSGEQKKAIVDLLFKTNRKVTVKQLKEDYFKKIECFDSVEISGVEDRFNASLGTYHDLLKIIKDKDFLDNEENEDILEDIVLTLTLFEDREMIEERLKTYAHLFDDKVMKQLKRRRYTGWGRLSRKLINGIRDKQSGKTILDFLKSDGFANRNFMQLIHDDSLTFKEDIQKAQVSGQGDSLHEHIANLAGSPAIKKGILQTVKVVDELVKVMGRHKPENIVIEMARENQTTQKGQKNSRERMKRIEEGIKELGSQILKEHPVENTQLQNEKLYLYYLQNGRDMYVDQELDINRLSDYDVDHIVPQSFLKDDSIDNKVLTRSDKARGKSDNVPSEEVVKKMKNYWRQLLNAKLITQRKFDNLTKAERGGLSELDKAGFIKRQLVETRQITKHVAQILDSRMNTKYDENDKLIREVKVITLKSKLVSDFRKDFQFYKVREINNYHHAHDAYLNAVVGTALIKKYPKLESEFVYGDYKVYDVRKMIAKSEQEIGKATAKYFFYSNIMNFFKTEITLANGEIRKRPLIETNGETGEIVWDKGRDFATVRKVLSMPQVNIVKKTEVQTGGFSKESILPKRNSDKLIARKKDWDPKKYGGFDSPTVAYSVLVVAKVEKGKSKKLKSVKELLGITIMERSSFEKNPIDFLEAKGYKEVKKDLIIKLPKYSLFELENGRKRMLASAGELQKGNELALPSKYVNFLYLASHYEKLKGSPEDNEQKQLFVEQHKHYLDEIIEQISEFSKRVILADANLDKVLSAYNKHRDKPIREQAENIIHLFTLTNLGAPAAFKYFDTTIDRKRYTSTKEVLDATLIHQSITGLYETRIDLSQLGGDGGGGGPAPEAAAKGGVLNLEEEYRLHEKPVPSSIDPSWLQLFPTVWAERAGMGLANQVPPVVVELRSGASPVAVRQYPMSKEAREGIRPHIQKFLDLGVLVPCRSPWNTPLLPVKKPGTNDYRPVQDLREINKRVQDIHPTVPNPYNLLSSLPPSYTWYSVLDLKDAFFCLRLHPNSQPLFAFEWKDPEKGNTGQLTWTRLPQGFKNSPTLFNEALHRDLAPFRALNPQVVLLQYVDDLLVAAPTYEDCKKGTQKLLQELSKLGYRVSAKKAQLCQREVTYLGYLLKEGKRWLTPARKATVMKIPVPTTPRQVREFLGKAGFCRLFIPGFASLAAPLYPLTKPSIPFIWTEEHQQAFDHIKKALLSAPALALPDLTKPFTLYIDERAGVARGVLTQTLGPWRRPVAYLSKKLDPVASGWPTCLKAVAAVALLLKDADKLTLGQNVTVIASHSLESIVRQPPDRWMTNARMTHYQSLLLNERVSFAPPAVLNPATLLPVESEATPVHRCSEILAEETGTRRDLEDQPLPGVPTWYTDGSSFITEGKRRAGAPIVDGKRTVWASSLPEGTSAQKAELVALTQALRLAEGKNINIYTDSRYAFATAHIHGAIYKQRGWLTSAGKDIKNKEEILALLEAIHLPRRVAIIHCPGHQRGSNPVATGNRRADEAAKQAALSTRVLAGTTKPAGKRTADGSEFEKRTADGSEFESPKKKAKVE

SEQ ID NO: 7468 - protein, 2009 aa, synthetic construct
MPAAKRVKLDGGDKKYSIGLDIGTNSVGWAVITDEYKVPSKKFKVLGNTDRHSIKKNLIGALLFDSGETAEATRLKRTARRRYTRRKNRICYLQEIFSNEMAKVDDSFFHRLEESFLVEEDKKHERHPIFGNIVDEVAYHEKYPTIYHLRKKLVDSTDKADLRLIYLALAHMIKFRGHFLIEGDLNPDNSDVDKLFIQLVQTYNQLFEENPINASGVDAKAILSARLSKSRRLENLIAQLPGEKKNGLFGNLIALSLGLTPNFKSNFDLAEDAKLQLSKDTYDDDLDNLLAQIGDQYADLFLAAKNLSDAILLSDILRVNTEITKAPLSASMIKRYDEHHQDLTLLKALVRQQLPEKYKEIFFDQSKNGYAGYIDGGASQEEFYKFIKPILEKMDGTEELLVKLNREDLLRKQRTFDNGSIPHQIHLGELHAILRRQEDFYPFLKDNREKIEKILTFRIPYYVGPLARGNSRFAWMTRKSEETITPWNFEEVVDKGASAQSFIERMTNFDKNLPNEKVLPKHSLLYEYFTVYNELTKVKYVTEGMRKPAFLSGEQKKAIVDLLFKTNRKVTVKQLKEDYFKKIECFDSVEISGVEDRFNASLGTYHDLLKIIKDKDFLDNEENEDILEDIVLTLTLFEDREMIEERLKTYAHLFDDKVMKQLKRRRYTGWGRLSRKLINGIRDKQSGKTILDFLKSDGFANRNFMQLIHDDSLTFKEDIQKAQVSGQGDSLHEHIANLAGSPAIKKGILQTVKVVDELVKVMGRHKPENIVIEMARENQTTQKGQKNSRERMKRIEEGIKELGSQILKEHPVENTQLQNEKLYLYYLQNGRDMYVDQELDINRLSDYDVDHIVPQSFLKDDSIDNKVLTRSDKARGKSDNVPSEEVVKKMKNYWRQLLNAKLITQRKFDNLTKAERGGLSELDKAGFIKRQLVETRQITKHVAQILDSRMNTKYDENDKLIREVKVITLKSKLVSDFRKDFQFYKVREINNYHHAHDAYLNAVVGTALIKKYPKLESEFVYGDYKVYDVRKMIAKSEQEIGKATAKYFFYSNIMNFFKTEITLANGEIRKRPLIETNGETGEIVWDKGRDFATVRKVLSMPQVNIVKKTEVQTGGFSKESILPKRNSDKLIARKKDWDPKKYGGFDSPTVAYSVLVVAKVEKGKSKKLKSVKELLGITIMERSSFEKNPIDFLEAKGYKEVKKDLIIKLPKYSLFELENGRKRMLASAGELQKGNELALPSKYVNFLYLASHYEKLKGSPEDNEQKQLFVEQHKHYLDEIIEQISEFSKRVILADANLDKVLSAYNKHRDKPIREQAENIIHLFTLTNLGAPAAFKYFDTTIDRKRYTSTKEVLDATLIHQSITGLYETRIDLSQLGGDGGGGGPAPEAAAKGGHLPPPPQVDQFPLNLPERLQALNDLVSKALEAGHIEPYSGPGNNPVFPVKKPNGKWRFIHDLRATNAITTTLTSPSPGPPDLTSLPTALPHLQTIDLTDAFFQIPLPKQYQPYFAFTIPQPCNYGPGTRYAWTVLPQGFKNSPTLFQQQLAAVLNPMRKMFPTSTIVQYMDDILLASPTNEELQQLSQLTLQALTTHGLPISQEKTQQTPGQIRFLGQVISPNHITYESTPTIPIKSQWTLTELQVILGEIQWVSKGTPILRKHLQSLYSALHPYRDPRACITLTPQQLHALHAIQQALQHNCRGRLNPALPLLGLISLSTSGTTSVIFQPKQNWPLAWLHTPHPPTSLCPWGHLLACTILTLDKYTLQHYGQLCQSFHHNMSKQALCDFLRNSPHPSVGILIHHMGRFHNLGSQPSGPWKTLLHLPTLLQEPRLLRPIFTLSPVVLDTAPCLFSDGSPQKAAYVLWDQTILQQDITPLPSHETHSAQKGELLALICGLRAAKPWPSLNIFLDSKYLIKYLHSLAIGAFLGTSAHQTLQAALPPLLQGKTIYLHHVRSHTNLPDPISTFNEYTDSLILAPLVPLAGKRTADGSEFEKRTADGSEFESPKKKAKVE

SEQ ID NO: 7469 - protein, 2127 aa, synthetic construct
MPAAKRVKLDGGDKKYSIGLDIGTNSVGWAVITDEYKVPSKKFKVLGNTDRHSIKKNLIGALLFDSGETAEATRLKRTARRRYTRRKNRICYLQEIFSNEMAKVDDSFFHRLEESFLVEEDKKHERHPIFGNIVDEVAYHEKYPTIYHLRKKLVDSTDKADLRLIYLALAHMIKFRGHFLIEGDLNPDNSDVDKLFIQLVQTYNQLFEENPINASGVDAKAILSARLSKSRRLENLIAQLPGEKKNGLFGNLIALSLGLTPNFKSNFDLAEDAKLQLSKDTYDDDLDNLLAQIGDQYADLFLAAKNLSDAILLSDILRVNTEITKAPLSASMIKRYDEHHQDLTLLKALVRQQLPEKYKEIFFDQSKNGYAGYIDGGASQEEFYKFIKPILEKMDGTEELLVKLNREDLLRKQRTFDNGSIPHQIHLGELHAILRRQEDFYPFLKDNREKIEKILTFRIPYYVGPLARGNSRFAWMTRKSEETITPWNFEEVVDKGASAQSFIERMTNFDKNLPNEKVLPKHSLLYEYFTVYNELTKVKYVTEGMRKPAFLSGEQKKAIVDLLFKTNRKVTVKQLKEDYFKKIECFDSVEISGVEDRFNASLGTYHDLLKIIKDKDFLDNEENEDILEDIVLTLTLFEDREMIEERLKTYAHLFDDKVMKQLKRRRYTGWGRLSRKLINGIRDKQSGKTILDFLKSDGFANRNFMQLIHDDSLTFKEDIQKAQVSGQGDSLHEHIANLAGSPAIKKGILQTVKVVDELVKVMGRHKPENIVIEMARENQTTQKGQKNSRERMKRIEEGIKELGSQILKEHPVENTQLQNEKLYLYYLQNGRDMYVDQELDINRLSDYDVDHIVPQSFLKDDSIDNKVLTRSDKARGKSDNVPSEEVVKKMKNYWRQLLNAKLITQRKFDNLTKAERGGLSELDKAGFIKRQLVETRQITKHVAQILDSRMNTKYDENDKLIREVKVITLKSKLVSDFRKDFQFYKVREINNYHHAHDAYLNAVVGTALIKKYPKLESEFVYGDYKVYDVRKMIAKSEQEIGKATAKYFFYSNIMNFFKTEITLANGEIRKRPLIETNGETGEIVWDKGRDFATVRKVLSMPQVNIVKKTEVQTGGFSKESILPKRNSDKLIARKKDWDPKKYGGFDSPTVAYSVLVVAKVEKGKSKKLKSVKELLGITIMERSSFEKNPIDFLEAKGYKEVKKDLIIKLPKYSLFELENGRKRMLASAGELQKGNELALPSKYVNFLYLASHYEKLKGSPEDNEQKQLFVEQHKHYLDEIIEQISEFSKRVILADANLDKVLSAYNKHRDKPIREQAENIIHLFTLTNLGAPAAFKYFDTTIDRKRYTSTKEVLDATLIHQSITGLYETRIDLSQLGGDGGGGGPAPEAAAKGGLLGRDLLTKLKAQIQFSTEGPQVTWEDRPAMCLVLNLEEEYRLHEKPVPPSIDPSWLQLFPMVWAEKAGMGLANQVPPVVVELKSDASPVAVRQYPMSKEAREGIRPHIQRFLDLGILVPCQSPWNTPLLPVKKPGTNDYRPVQDLREVNKRVQDIHPTVPNPYNLLSSLPPSHTWYSVLDLKDAFFCLKLHPNSQPLFAFEWRDPEKGNTGQLTWTRLPQGFKNSPTLFNEALHRDLASFRALNPQVVMLQYVDDLLVAAPTYRDCKEGTRRLLQELSKLGYRVSAKKAQLCREEVTYLGYLLKGGKRWLTPARKATVMKIPTPTTPRQVREFLGTAGFCRLWIPGFASLAAPLYPLTRPKVPFTWTEAHQEAFGRIKEALLSAPALALPDLTKPFALYVDEKEGVARGVLTQTLGPWRRPVAYLSKKLDPVASGWPTCLKAIAAVALLLKDADKLTLGQNVLVIAPHNLESIVRQPPDRWMTNARMTHYQSLLLNERVSFAPPAILNPATLLPVESDDTPIHICSEILAEETGTRPDLRDQPLPGVPAWYTDGSSFIMDGRRQAGAAIVDNKRTVWASNLPEGTSAQKAELIALTQALRLAEGKSINIYTDSRYAFATAHVHGAIYKQRGWLTSAGKDIKNKEEILALLEAIHLPKRVAIIHCPGHQRGTDPVATGNRKADEAAKQAAQSTRILTETTKNAGKRTADGSEFEKRTADGSEFESPKKKAKVE

SEQ ID NO: 7470 - protein, 2127 aa, synthetic construct
MPAAKRVKLDGGDKKYSIGLDIGTNSVGWAVITDEYKVPSKKFKVLGNTDRHSIKKNLIGALLFDSGETAEATRLKRTARRRYTRRKNRICYLQEIFSNEMAKVDDSFFHRLEESFLVEEDKKHERHPIFGNIVDEVAYHEKYPTIYHLRKKLVDSTDKADLRLIYLALAHMIKFRGHFLIEGDLNPDNSDVDKLFIQLVQTYNQLFEENPINASGVDAKAILSARLSKSRRLENLIAQLPGEKKNGLFGNLIALSLGLTPNFKSNFDLAEDAKLQLSKDTYDDDLDNLLAQIGDQYADLFLAAKNLSDAILLSDILRVNTEITKAPLSASMIKRYDEHHQDLTLLKALVRQQLPEKYKEIFFDQSKNGYAGYIDGGASQEEFYKFIKPILEKMDGTEELLVKLNREDLLRKQRTFDNGSIPHQIHLGELHAILRRQEDFYPFLKDNREKIEKILTFRIPYYVGPLARGNSRFAWMTRKSEETITPWNFEEVVDKGASAQSFIERMTNFDKNLPNEKVLPKHSLLYEYFTVYNELTKVKYVTEGMRKPAFLSGEQKKAIVDLLFKTNRKVTVKQLKEDYFKKIECFDSVEISGVEDRFNASLGTYHDLLKIIKDKDFLDNEENEDILEDIVLTLTLFEDREMIEERLKTYAHLFDDKVMKQLKRRRYTGWGRLSRKLINGIRDKQSGKTILDFLKSDGFANRNFMQLIHDDSLTFKEDIQKAQVSGQGDSLHEHIANLAGSPAIKKGILQTVKVVDELVKVMGRHKPENIVIEMARENQTTQKGQKNSRERMKRIEEGIKELGSQILKEHPVENTQLQNEKLYLYYLQNGRDMYVDQELDINRLSDYDVDHIVPQSFLKDDSIDNKVLTRSDKARGKSDNVPSEEVVKKMKNYWRQLLNAKLITQRKFDNLTKAERGGLSELDKAGFIKRQLVETRQITKHVAQILDSRMNTKYDENDKLIREVKVITLKSKLVSDFRKDFQFYKVREINNYHHAHDAYLNAVVGTALIKKYPKLESEFVYGDYKVYDVRKMIAKSEQEIGKATAKYFFYSNIMNFFKTEITLANGEIRKRPLIETNGETGEIVWDKGRDFATVRKVLSMPQVNIVKKTEVQTGGFSKESILPKRNSDKLIARKKDWDPKKYGGFDSPTVAYSVLVVAKVEKGKSKKLKSVKELLGITIMERSSFEKNPIDFLEAKGYKEVKKDLIIKLPKYSLFELENGRKRMLASAGELQKGNELALPSKYVNFLYLASHYEKLKGSPEDNEQKQLFVEQHKHYLDEIIEQISEFSKRVILADANLDKVLSAYNKHRDKPIREQAENIIHLFTLTNLGAPAAFKYFDTTIDRKRYTSTKEVLDATLIHQSITGLYETRIDLSQLGGDGGGGGPAPEAAAKGGLLGRDLLTKLKAQIQFSTEGPQVTWEDRPAMCLVLNLEEEYRLHEKPVPPSIDPSWLQLFPMVWAEKAGMGLANQVPPVVVELKSDASPVAVRQYPMSKEAREGIRPHIQRFLDLGILVPCQSPWNTPLLPVKKPGTNDYRPVQDLREVNKRVQDIHPTVPNPYNLLSSLPPSHTWYSVLDLKDAFFCLKLHPNSQPLFAFEWRDPEKGNTGQLTWTRLPQGFKNSPTLFNEALHRDLASFRALNPQVVMLQYVDDLLVAAPTYRDCKEGTRRLLQELSKLGYRVSAKKAQLCREEVTYLGYLLKGGKRWLTPARKATVMKIPTPTTPRQVREFLGKAGFCRLFIPGFASLAAPLYPLTRPKVPFTWTEAHQEAFGRIKEALLSAPALALPDLTKPFALYVDEKEGVARGVLTQTLGPWRRPVAYLSKKLDPVASGWPTCLKAIAAVALLLKDADKLTLGQNVLVIAPHNLESIVRQPPDRWMTNARMTHYQSLLLNERVSFAPPAILNPATLLPVESDDTPIHICSEILAEETGTRPDLRDQPLPGVPAWYTDGSSFIMDGRRQAGAAIVDNKRTVWASNLPEGTSAQKAELIALTQALRLAEGKSINIYTDSRYAFATAHVHGAIYKQRGWLTSAGKDIKNKEEILALLEAIHLPKRVAIIHCPGHQRGTDPVATGNRKADEAAKQAAQSTRILTETTKNAGKRTADGSEFEKRTADGSEFESPKKKAKVE

SEQ ID NO: 7471 - protein, 2096 aa, synthetic construct
MPAAKRVKLDGGDKKYSIGLDIGTNSVGWAVITDEYKVPSKKFKVLGNTDRHSIKKNLIGALLFDSGETAEATRLKRTARRRYTRRKNRICYLQEIFSNEMAKVDDSFFHRLEESFLVEEDKKHERHPIFGNIVDEVAYHEKYPTIYHLRKKLVDSTDKADLRLIYLALAHMIKFRGHFLIEGDLNPDNSDVDKLFIQLVQTYNQLFEENPINASGVDAKAILSARLSKSRRLENLIAQLPGEKKNGLFGNLIALSLGLTPNFKSNFDLAEDAKLQLSKDTYDDDLDNLLAQIGDQYADLFLAAKNLSDAILLSDILRVNTEITKAPLSASMIKRYDEHHQDLTLLKALVRQQLPEKYKEIFFDQSKNGYAGYIDGGASQEEFYKFIKPILEKMDGTEELLVKLNREDLLRKQRTFDNGSIPHQIHLGELHAILRRQEDFYPFLKDNREKIEKILTFRIPYYVGPLARGNSRFAWMTRKSEETITPWNFEEVVDKGASAQSFIERMTNFDKNLPNEKVLPKHSLLYEYFTVYNELTKVKYVTEGMRKPAFLSGEQKKAIVDLLFKTNRKVTVKQLKEDYFKKIECFDSVEISGVEDRFNASLGTYHDLLKIIKDKDFLDNEENEDILEDIVLTLTLFEDREMIEERLKTYAHLFDDKVMKQLKRRRYTGWGRLSRKLINGIRDKQSGKTILDFLKSDGFANRNFMQLIHDDSLTFKEDIQKAQVSGQGDSLHEHIANLAGSPAIKKGILQTVKVVDELVKVMGRHKPENIVIEMARENQTTQKGQKNSRERMKRIEEGIKELGSQILKEHPVENTQLQNEKLYLYYLQNGRDMYVDQELDINRLSDYDVDHIVPQSFLKDDSIDNKVLTRSDKARGKSDNVPSEEVVKKMKNYWRQLLNAKLITQRKFDNLTKAERGGLSELDKAGFIKRQLVETRQITKHVAQILDSRMNTKYDENDKLIREVKVITLKSKLVSDFRKDFQFYKVREINNYHHAHDAYLNAVVGTALIKKYPKLESEFVYGDYKVYDVRKMIAKSEQEIGKATAKYFFYSNIMNFFKTEITLANGEIRKRPLIETNGETGEIVWDKGRDFATVRKVLSMPQVNIVKKTEVQTGGFSKESILPKRNSDKLIARKKDWDPKKYGGFDSPTVAYSVLVVAKVEKGKSKKLKSVKELLGITIMERSSFEKNPIDFLEAKGYKEVKKDLIIKLPKYSLFELENGRKRMLASAGELQKGNELALPSKYVNFLYLASHYEKLKGSPEDNEQKQLFVEQHKHYLDEIIEQISEFSKRVILADANLDKVLSAYNKHRDKPIREQAENIIHLFTLTNLGAPAAFKYFDTTIDRKRYTSTKEVLDATLIHQSITGLYETRIDLSQLGGDGGGGGPAPEAAAKGGLGIEDEYRLHETSTEPDVSLGSTWLSDFPQAWAETGGMGLAVRQAPLIIPLKATSTPVSIQQYPMSHEARLGIKPHIQRLLDQGILVPCQSPWNTPLLPVKKPGTNDYRPVQDLREVNKRVEDIHPTVPNPYNLLSGLPPSHQWYTVLDLKDAFFCLRLHPTSQPLFAFEWRDPGMGISGQLTWTRLPQGFKNSPTLFNEALHRDLADFRIQHPDLILLQYVDDILLAATSELDCQQGTRALLQTLGDLGYRASAKKAQICQKQVKYLGYLLREGQRWLTEARKETVMGQPVPKTPRQLREFLGKAGFCRLFIPGFAEMAAPLYPLTKPGTLFSWGPDQQKAYQEIKQALLTAPALGLPDLTKPFELFVDEKQGYAKGVLTQKLGPWRRPVAYLSKKLDPVAAGWPPCLRMVAAIAVLTKDAGKLTMGQPLVILAPHAVEALVKQPPDRWLSNARMTHYQAMLLDTDRVQFGPVVALNPATLLPLPEEGAPHDCLEILAETHGTRPDLTDQPIPDADHTWYTDGSSFLQEGQRKAGAAVTTETEVIWAGALPAGTSAQRAELIALTQALKMAEGKRLNVYTDSRYAFATAHIHGEIYRRRGWLTSEGREIKNKSEILALLKALFLPKRLSIIHCLGHQKGDSAEARGNRLADQAAREAAIKTPPDTSTLLIAGKRTADGSEFEKRTADGSEFESPKKKAKVE

SEQ ID NO: 7472 - protein, 2096 aa, synthetic construct
MPAAKRVKLDGGDKKYSIGLDIGTNSVGWAVITDEYKVPSKKFKVLGNTDRHSIKKNLIGALLFDSGETAEATRLKRTARRRYTRRKNRICYLQEIFSNEMAKVDDSFFHRLEESFLVEEDKKHERHPIFGNIVDEVAYHEKYPTIYHLRKKLVDSTDKADLRLIYLALAHMIKFRGHFLIEGDLNPDNSDVDKLFIQLVQTYNQLFEENPINASGVDAKAILSARLSKSRRLENLIAQLPGEKKNGLFGNLIALSLGLTPNFKSNFDLAEDAKLQLSKDTYDDDLDNLLAQIGDQYADLFLAAKNLSDAILLSDILRVNTEITKAPLSASMIKRYDEHHQDLTLLKALVRQQLPEKYKEIFFDQSKNGYAGYIDGGASQEEFYKFIKPILEKMDGTEELLVKLNREDLLRKQRTFDNGSIPHQIHLGELHAILRRQEDFYPFLKDNREKIEKILTFRIPYYVGPLARGNSRFAWMTRKSEETITPWNFEEVVDKGASAQSFIERMTNFDKNLPNEKVLPKHSLLYEYFTVYNELTKVKYVTEGMRKPAFLSGEQKKAIVDLLFKTNRKVTVKQLKEDYFKKIECFDSVEISGVEDRFNASLGTYHDLLKIIKDKDFLDNEENEDILEDIVLTLTLFEDREMIEERLKTYAHLFDDKVMKQLKRRRYTGWGRLSRKLINGIRDKQSGKTILDFLKSDGFANRNFMQLIHDDSLTFKEDIQKAQVSGQGDSLHEHIANLAGSPAIKKGILQTVKVVDELVKVMGRHKPENIVIEMARENQTTQKGQKNSRERMKRIEEGIKELGSQILKEHPVENTQLQNEKLYLYYLQNGRDMYVDQELDINRLSDYDVDHIVPQSFLKDDSIDNKVLTRSDKARGKSDNVPSEEVVKKMKNYWRQLLNAKLITQRKFDNLTKAERGGLSELDKAGFIKRQLVETRQITKHVAQILDSRMNTKYDENDKLIREVKVITLKSKLVSDFRKDFQFYKVREINNYHHAHDAYLNAVVGTALIKKYPKLESEFVYGDYKVYDVRKMIAKSEQEIGKATAKYFFYSNIMNFFKTEITLANGEIRKRPLIETNGETGEIVWDKGRDFATVRKVLSMPQVNIVKKTEVQTGGFSKESILPKRNSDKLIARKKDWDPKKYGGFDSPTVAYSVLVVAKVEKGKSKKLKSVKELLGITIMERSSFEKNPIDFLEAKGYKEVKKDLIIKLPKYSLFELENGRKRMLASAGELQKGNELALPSKYVNFLYLASHYEKLKGSPEDNEQKQLFVEQHKHYLDEIIEQISEFSKRVILADANLDKVLSAYNKHRDKPIREQAENIIHLFTLTNLGAPAAFKYFDTTIDRKRYTSTKEVLDATLIHQSITGLYETRIDLSQLGGDGGGGGPAPEAAAKGGTLGIEDEYRLHETSTEPDVSLGSTWLSDFPQAWAETGGMGLAVRQAPLIIPLKATSTPVSIQQYPMSHEARLGIKPHIQRLLDQGILVPCQSPWNTPLLPVKKPGTNDYRPVQDLREVNKRVEDIHPTVPNPYNLLSGLPPSHQWYTVLDLKDAFFCLRLHPTSQPLFAFEWRDPGMGISGQLTWTRLPQGFKNSPTLFNEALHRDLADFRIQHPDLILLQYVDDILLAATSELDCQQGTRALLQTLGDLGYRASAKKAQICQKQVKYLGYLLREGQRWLTEARKETVMGQPVPKTPRQLREFLGTAGFCRLWIPGFAEMAAPLYPLTKPGTLFSWGPDQQKAYQEIKQALLTAPALGLPDLTKPFELFVDEKQGYAKGVLTQKLGPWRRPVAYLSKKLDPVAAGWPPCLRMVAAIAVLTKDAGKLTMGQPLVILAPHAVEALVKQPPDRWLSNARMTHYQAMLLDTDRVQFGPVVALNPATLLPLPEEGAPHDCLEILAETHGTRPDLTDQPIPDADHTWYTDGSSFLQEGQRKAGAAVTTETEVIWAGALPAGTSAQRAELIALTQALKMAEGKRLNVYTDSRYAFATAHIHGEIYRRRGWLTSEGREIKNKSEILALLKALFLPKRLSIIHCLGHQKGDSAEARGNRLADQAAREAAIKTPPDTSTLLAGKRTADGSEFEKRTADGSEFESPKKKAKVE

SEQ ID NO: 7473 - protein, 2096 aa, synthetic construct; identical to SEQ ID NO: 7471

SEQ ID NO: 7474 - protein, 2096 aa, synthetic construct; identical to SEQ ID NO: 7472

SEQ ID NO: 7475 - protein, 2096 aa, synthetic construct
MPAAKRVKLDGGDKKYSIGLDIGTNSVGWAVITDEYKVPSKKFKVLGNTDRHSIKKNLIGALLFDSGETAEATRLKRTARRRYTRRKNRICYLQEIFSNEMAKVDDSFFHRLEESFLVEEDKKHERHPIFGNIVDEVAYHEKYPTIYHLRKKLVDSTDKADLRLIYLALAHMIKFRGHFLIEGDLNPDNSDVDKLFIQLVQTYNQLFEENPINASGVDAKAILSARLSKSRRLENLIAQLPGEKKNGLFGNLIALSLGLTPNFKSNFDLAEDAKLQLSKDTYDDDLDNLLAQIGDQYADLFLAAKNLSDAILLSDILRVNTEITKAPLSASMIKRYDEHHQDLTLLKALVRQQLPEKYKEIFFDQSKNGYAGYIDGGASQEEFYKFIKPILEKMDGTEELLVKLNREDLLRKQRTFDNGSIPHQIHLGELHAILRRQEDFYPFLKDNREKIEKILTFRIPYYVGPLARGNSRFAWMTRKSEETITPWNFEEVVDKGASAQSFIERMTNFDKNLPNEKVLPKHSLLYEYFTVYNELTKVKYVTEGMRKPAFLSGEQKKAIVDLLFKTNRKVTVKQLKEDYFKKIECFDSVEISGVEDRFNASLGTYHDLLKIIKDKDFLDNEENEDILEDIVLTLTLFEDREMIEERLKTYAHLFDDKVMKQLKRRRYTGWGRLSRKLINGIRDKQSGKTILDFLKSDGFANRNFMQLIHDDSLTFKEDIQKAQVSGQGDSLHEHIANLAGSPAIKKGILQTVKVVDELVKVMGRHKPENIVIEMARENQTTQKGQKNSRERMKRIEEGIKELGSQILKEHPVENTQLQNEKLYLYYLQNGRDMYVDQELDINRLSDYDVDHIVPQSFLKDDSIDNKVLTRSDKARGKSDNVPSEEVVKKMKNYWRQLLNAKLITQRKFDNLTKAERGGLSELDKAGFIKRQLVETRQITKHVAQILDSRMNTKYDENDKLIREVKVITLKSKLVSDFRKDFQFYKVREINNYHHAHDAYLNAVVGTALIKKYPKLESEFVYGDYKVYDVRKMIAKSEQEIGKATAKYFFYSNIMNFFKTEITLANGEIRKRPLIETNGETGEIVWDKGRDFATVRKVLSMPQVNIVKKTEVQTGGFSKESILPKRNSDKLIARKKDWDPKKYGGFDSPTVAYSVLVVAKVEKGKSKKLKSVKELLGITIMERSSFEKNPIDFLEAKGYKEVKKDLIIKLPKYSLFELENGRKRMLASAGELQKGNELALPSKYVNFLYLASHYEKLKGSPEDNEQKQLFVEQHKHYLDEIIEQISEFSKRVILADANLDKVLSAYNKHRDKPIREQAENIIHLFTLTNLGAPAAFKYFDTTIDRKRYTSTKEVLDATLIHQSITGLYETRIDLSQLGGDGGGGGPAPEAAAKGGTLNIEDEYRLHETSKEPDVSLGSTWLSDFPQAWAETGGMGLAVRQAPLIIPLKATSTPVSIKQYPMSQEARLGIKPHIQRLLDQGILVPCQSPWNTPLLPVKKPGTNDYRPVQDLREVNKRVEDIHPTVPNPYNLLSGLPPSHQWYTVLDLKDAFFCLRLHPTSQPLFAFEWRDPEMGISGQLTWTRLPQGFKNSPTLFNEALHRDLAGFRIQHPDLILLQYVDDLLLAATSELDCQQGTRALLQTLGDLGYRASAKKAQICQKQVKYLGYLLKEGQRWLTEARKETVMGQPIPKTPRQLREFLGTAGFCRLWIPGFAEMAAPLYPLTKPGTLFNWGPDQQKAFQEIKQALLTAPALGLPDLTKPFELFVDEKQGYAKGVLTQKLGPWRRPVAYLSKKLDPVAAGWPPCLRMVAAIAVLTKDAGKLTMGQPLVILAPHAVEALVKQPPDRWLSNARMTHYQALLLDTDRVQFGPVVALNPATLLPLPEEGLQHDCLDILAEAHGTRSDLMDQPLPDADHTWYTDGSSFLQEGQRKAGAAVTTETEVIWARALPAGTSAQRAELIALTQALKMAEGKKLNVYTDSRYAFATAHIHGEIYRRRGWLTSEGKEIKNKDEILALLKALFLPKRLSIIHCPGHQKGNSAEARGNRMADQAAREVATRETPETSTLLAGKRTADGSEFEKRTADGSEFESPKKKAKVE

SEQ ID NO: 7476 - protein, 2096 aa, synthetic construct; identical to SEQ ID NO: 4534

SEQ ID NO: 7477 - protein, 2096 aa, synthetic construct
MPAAKRVKLDGGDKKYSIGLDIGTNSVGWAVITDEYKVPSKKFKVLGNTDRHSIKKNLIGALLFDSGETAEATRLKRTARRRYTRRKNRICYLQEIFSNEMAKVDDSFFHRLEESFLVEEDKKHERHPIFGNIVDEVAYHEKYPTIYHLRKKLVDSTDKADLRLIYLALAHMIKFRGHFLIEGDLNPDNSDVDKLFIQLVQTYNQLFEENPINASGVDAKAILSARLSKSRRLENLIAQLPGEKKNGLFGNLIALSLGLTPNFKSNFDLAEDAKLQLSKDTYDDDLDNLLAQIGDQYADLFLAAKNLSDAILLSDILRVNTEITKAPLSASMIKRYDEHHQDLTLLKALVRQQLPEKYKEIFFDQSKNGYAGYIDGGASQEEFYKFIKPILEKMDGTEELLVKLNREDLLRKQRTFDNGSIPHQIHLGELHAILRRQEDFYPFLKDNREKIEKILTFRIPYYVGPLARGNSRFAWMTRKSEETITPWNFEEVVDKGASAQSFIERMTNFDKNLPNEKVLPKHSLLYEYFTVYNELTKVKYVTEGMRKPAFLSGEQKKAIVDLLFKTNRKVTVKQLKEDYFKKIECFDSVEISGVEDRFNASLGTYHDLLKIIKDKDFLDNEENEDILEDIVLTLTLFEDREMIEERLKTYAHLFDDKVMKQLKRRRYTGWGRLSRKLINGIRDKQSGKTILDFLKSDGFANRNFMQLIHDDSLTFKEDIQKAQVSGQGDSLHEHIANLAGSPAIKKGILQTVKVVDELVKVMGRHKPENIVIEMARENQTTQKGQKNSRERMKRIEEGIKELGSQILKEHPVENTQLQNEKLYLYYLQNGRDMYVDQELDINRLSDYDVDHIVPQSFLKDDSIDNKVLTRSDKARGKSDNVPSEEVVKKMKNYWRQLLNAKLITQRKFDNLTKAERGGLSELDKAGFIKRQLVETRQITKHVAQILDSRMNTKYDENDKLIREVKVITLKSKLVSDFRKDFQFYKVREINNYHHAHDAYLNAVVGTALIKKYPKLESEFVYGDYKVYDVRKMIAKSEQEIGKATAKYFFYSNIMNFFKTEITLANGEIRKRPLIETNGETGEIVWDKGRDFATVRKVLSMPQVNIVKKTEVQTGGFSKESILPKRNSDKLIARKKDWDPKKYGGFDSPTVAYSVLVVAKVEKGKSKKLKSVKELLGITIMERSSFEKNPIDFLEAKGYKEVKKDLIIKLPKYSLFELENGRKRMLASAGELQKGNELALPSKYVNFLYLASHYEKLKGSPEDNEQKQLFVEQHKHYLDEIIEQISEFSKRVILADANLDKVLSAYNKHRDKPIREQAENIIHLFTLTNLGAPAAFKYFDTTIDRKRYTSTKEVLDATLIHQSITGLYETRIDLSQLGGDGGGGGPAPEAAAKGGTLNIEDEHRLHETSKEPDVSLGSTWLSDFPQAWAETGGMGLAVRQAPLIIPLKATSTPVSIKQYPMSQEARLGIKPHIQRLLDQGILVPCQSPWNTPLLPVKKPGTNDYRPVQDLREVNKRVEDIHPTVPNPYNLLSGLPPSHQWYTVLDLKDAFFCLRLHPTSQPLFAFEWRDPEMGISGQLTWTRLPQGFKNSPTLFDEALHRDLADFRIQHPDLILLQYVDDLLLAATSELDCQQGTRALLQTLGNLGYRASAKKAQICQKQVKYLGYLLKEGQRWLTEARKETVMGQPTPKTPRQLREFLGTAGFCRLWIPGFAEMAAPLYPLTKTGTLFNWGPDQQKAYQEIKQALLTAPALGLPDLTKPFELFVDEKQGYAKGVLTQKLGPWRRPVAYLSKKLDPVAAGWPPCLRMVAAIAVLTKDAGKLTMGQPLVILAPHAVEALVKQPPDRWLSNARMTHYQALLLDTDRVQFGPVVALNPATLLPLPEEGLQHNCLDILAEAHGTRPDLTDQPLPDADHTWYTDGSSLLQEGQRKAGAAVTTETEVIWAKALPAGTSAQRAELIALTQALKMAEGKKLNVYTDSRYAFATAHIHGEIYRRRGLLTSEGKEIKNKDEILALLKALFLPKRLSIIHCPGHQKGHSAEARGNRMADQAARKAAITETPDTSTLLAGKRTADGSEFEKRTADGSEFESPKKKAKVE

SEQ ID NO: 7478 - protein, 2096 aa, synthetic construct; identical to SEQ ID NO: 4534

SEQ ID NO: 7479 - protein, 2088 aa, synthetic construct
MPAAKRVKLDGGDKKYSIGLDIGTNSVGWAVITDEYKVPSKKFKVLGNTDRHSIKKNLIGALLFDSGETAEATRLKRTARRRYTRRKNRICYLQEIFSNEMAKVDDSFFHRLEESFLVEEDKKHERHPIFGNIVDEVAYHEKYPTIYHLRKKLVDSTDKADLRLIYLALAHMIKFRGHFLIEGDLNPDNSDVDKLFIQLVQTYNQLFEENPINASGVDAKAILSARLSKSRRLENLIAQLPGEKKNGLFGNLIALSLGLTPNFKSNFDLAEDAKLQLSKDTYDDDLDNLLAQIGDQYADLFLAAKNLSDAILLSDILRVNTEITKAPLSASMIKRYDEHHQDLTLLKALVRQQLPEKYKEIFFDQSKNGYAGYIDGGASQEEFYKFIKPILEKMDGTEELLVKLNREDLLRKQRTFDNGSIPHQIHLGELHAILRRQEDFYPFLKDNREKIEKILTFRIPYYVGPLARGNSRFAWMTRKSEETITPWNFEEVVDKGASAQSFIERMTNFDKNLPNEKVLPKHSLLYEYFTVYNELTKVKYVTEGMRKPAFLSGEQKKAIVDLLFKTNRKVTVKQLKEDYFKKIECFDSVEISGVEDRFNASLGTYHDLLKIIKDKDFLDNEENEDILEDIVLTLTLFEDREMIEERLKTYAHLFDDKVMKQLKRRRYTGWGRLSRKLINGIRDKQSGKTILDFLKSDGFANRNFMQLIHDDSLTFKEDIQKAQVSGQGDSLHEHIANLAGSPAIKKGILQTVKVVDELVKVMGRHKPENIVIEMARENQTTQKGQKNSRERMKRIEEGIKELGSQILKEHPVENTQLQNEKLYLYYLQNGRDMYVDQELDINRLSDYDVDHIVPQSFLKDDSIDNKVLTRSDKARGKSDNVPSEEVVKKMKNYWRQLLNAKLITQRKFDNLTKAERGGLSELDKAGFIKRQLVETRQITKHVAQILDSRMNTKYDENDKLIREVKVITLKSKLVSDFRKDFQFYKVREINNYHHAHDAYLNAVVGTALIKKYPKLESEFVYGDYKVYDVRKMIAKSEQEIGKATAKYFFYSNIMNFFKTEITLANGEIRKRPLIETNGETGEIVWDKGRDFATVRKVLSMPQVNIVKKTEVQTGGFSKESILPKRNSDKLIARKKDWDPKKYGGFDSPTVAYSVLVVAKVEKGKSKKLKSVKELLGITIMERSSFEKNPIDFLEAKGYKEVKKDLIIKLPKYSLFELENGRKRMLASAGELQKGNELALPSKYVNFLYLASHYEKLKGSPEDNEQKQLFVEQHKHYLDEIIEQISEFSKRVILADANLDKVLSAYNKHRDKPIREQAENIIHLFTLTNLGAPAAFKYFDTTIDRKRYTSTKEVLDATLIHQSITGLYETRIDLSQLGGDGGGGGPAPEAAAKGGLDDEYRLYSPLVKPDQNIQFWLEQFPQAWAETAGMGLAKQVPPQVIQLKASATPVSVRQYPLSKEAQEGIRPHVQRLIQQGILVPVQSPWNTPLLPVRKPGTNDYRPVQDLREVNKRVQDIHPTVPNPYNLLCALPPQRSWYTVLDLKDAFFCLRLHPTSQPLFAFEWRDPGTGRTGQLTWTRLPQGFKNSPTIFNEALHRDLANFRIQHPQVTLLQYVDDLLLAGATKQDCLEGTKALLLELSDLGYRASAKKAQICRREVTYLGYSLRDGQRWLTEARKKTVVQIPAPTTAKQVREFLGKAGFCRLFIPGFATLAAPLYPLTKPKGEFSWAPEHQKAFDAIKKALLSAPALALPDVTKPFTLYVDERKGVARGVLTQTLGPWRRPVAYLSKKLDPVASGWPVCLKAIAAVAILVKDADKLTLGQNITVIAPHALENIVRQPPDRWMTNARMTHYQSLLLTERVTFAPPAALNPATLLPEETDEPVTHDCHQLLIEETGVRKDLTDIPLTGEVLTWFTDGSSYVVEGKRMAGAAVVDGTRTIWASSLPEGTSAQKAELMALTQALRLAEGKSINIYTDSRYAFATAHVHGAIYKQRGWLTSAGREIKNKEEILSLLEALHLPKRLAIIHCPGHQKAKDPISRGNQMADRVAKQAAQGVNLLPAGKRTADGSEFEKRTADGSEFESPKKKAKVE

SEQ ID NO: 7480 - protein, 2088 aa, synthetic construct; identical to SEQ ID NO: 7479

SEQ ID NO: 7481 - protein, 2090 aa, synthetic construct
MPAAKRVKLDGGDKKYSIGLDIGTNSVGWAVITDEYKVPSKKFKVLGNTDRHSIKKNLIGALLFDSGETAEATRLKRTARRRYTRRKNRICYLQEIFSNEMAKVDDSFFHRLEESFLVEEDKKHERHPIFGNIVDEVAYHEKYPTIYHLRKKLVDSTDKADLRLIYLALAHMIKFRGHFLIEGDLNPDNSDVDKLFIQLVQTYNQLFEENPINASGVDAKAILSARLSKSRRLENLIAQLPGEKKNGLFGNLIALSLGLTPNFKSNFDLAEDAKLQLSKDTYDDDLDNLLAQIGDQYADLFLAAKNLSDAILLSDILRVNTEITKAPLSASMIKRYDEHHQDLTLLKALVRQQLPEKYKEIFFDQSKNGYAGYIDGGASQEEFYKFIKPILEKMDGTEELLVKLNREDLLRKQRTFDNGSIPHQIHLGELHAILRRQEDFYPFLKDNREKIEKILTFRIPYYVGPLARGNSRFAWMTRKSEETITPWNFEEVVDKGASAQSFIERMTNFDKNLPNEKVLPKHSLLYEYFTVYNELTKVKYVTEGMRKPAFLSGEQKKAIVDLLFKTNRKVTVKQLKEDYFKKIECFDSVEISGVEDRFNASLGTYHDLLKIIKDKDFLDNEENEDILEDIVLTLTLFEDREMIEERLKTYAHLFDDKVMKQLKRRRYTGWGRLSRKLINGIRDKQSGKTILDFLKSDGFANRNFMQLIHDDSLTFKEDIQKAQVSGQGDSLHEHIANLAGSPAIKKGILQTVKVVDELVKVMGRHKPENIVIEMARENQTTQKGQKNSRERMKRIEEGIKELGSQILKEHPVENTQLQNEKLYLYYLQNGRDMYVDQELDINRLSDYDVDHIVPQSFLKDDSIDNKVLTRSDKARGKSDNVPSEEVVKKMKNYWRQLLNAKLITQRKFDNLTKAERGGLSELDKAGFIKRQLVETRQITKHVAQILDSRMNTKYDENDKLIREVKVITLKSKLVSDFRKDFQFYKVREINNYHHAHDAYLNAVVGTALIKKYPKLESEFVYGDYKVYDVRKMIAKSEQEIGKATAKYFFYSNIMNFFKTEITLANGEIRKRPLIETNGETGEIVWDKGRDFATVRKVLSMPQVNIVKKTEVQTGGFSKESILPKRNSDKLIARKKDWDPKKYGGFDSPTVAYSVLVVAKVEKGKSKKLKSVKELLGITIMERSSFEKNPIDFLEAKGYKEVKKDLIIKLPKYSLFELENGRKRMLASAGELQKGNELALPSKYVNFLYLASHYEKLKGSPEDNEQKQLFVEQHKHYLDEIIEQISEFSKRVILADANLDKVLSAYNKHRDKPIREQAENIIHLFTLTNLGAPAAFKYFDTTIDRKRYTSTKEVLDATLIHQSITGLYETRIDLSQLGGDGGGGGPAPEAAAKGGTLQLDDEYRLYSPLVKPDQNIQFWLEQFPQAWAETAGMGLAKQVPPQVIQLKASATPVSVRQYPLSKEAQEGIRPHVQRLIQQGILVPVQSPWNTPLLPVRKPGTNDYRPVQDLREVNKRVQDIHPTVPNPYNLLCALPPQRSWYTVLDLKDAFFCLRLHPTSQPLFAFEWRDPGTGRTGQLTWTRLPQGFKNSPTIFDEALHRDLANFRIQHPQVTLLQYVDDLLLAGATKQDCLEGTKALLLELSDLGYRASAKKAQICRREVTYLGYSLRDGQRWLTEARKKTVVQIPAPTTAKQVREFLGTAGFCRLWIPGFATLAAPLYPLTKEKGEFSWAPEHQKAFDAIKKALLSAPALALPDVTKPFTLYVDERKGVARGVLTQTLGPWRRPVAYLSKKLDPVASGWPVCLKAIAAVAILVKDADKLTLGQNITVIAPHALENIVRQPPDRWMTNARMTHYQSLLLTERVTFAPPAALNPATLLPEETDEPVTHDCHQLLIEETGVRKDLTDIPLTGEVLTWFTDGSSYVVEGKRMAGAAVVDGTRTIWASSLPEGTSAQKAELMALTQALRLAEGKSINIYTDSRYAFATAHVHGAIYKQRGLLTSAGREIKNKEEILSLLEALHLPKRLAIIHCPGHQKAKDPISRGNQMADRVAKQAAQGVNLLAGKRTADGSEFEKRTADGSEFESPKKKAKVE

SEQ ID NO: 7482 - protein, 2176 aa, synthetic construct
MPAAKRVKLDGGDKKYSIGLDIGTNSVGWAVITDEYKVPSKKFKVLGNTDRHSIKKNLIGALLFDSGETAEATRLKRTARRRYTRRKNRICYLQEIFSNEMAKVDDSFFHRLEESFLVEEDKKHERHPIFGNIVDEVAYHEKYPTIYHLRKKLVDSTDKADLRLIYLALAHMIKFRGHFLIEGDLNPDNSDVDKLFIQLVQTYNQLFEENPINASGVDAKAILSARLSKSRRLENLIAQLPGEKKNGLFGNLIALSLGLTPNFKSNFDLAEDAKLQLSKDTYDDDLDNLLAQIGDQYADLFLAAKNLSDAILLSDILRVNTEITKAPLSASMIKRYDEHHQDLTLLKALVRQQLPEKYKEIFFDQSKNGYAGYIDGGASQEEFYKFIKPILEKMDGTEELLVKLNREDLLRKQRTFDNGSIPHQIHLGELHAILRRQEDFYPFLKDNREKIEKILTFRIPYYVGPLARGNSRFAWMTRKSEETITPWNFEEVVDKGASAQSFIERMTNFDKNLPNEKVLPKHSLLYEYFTVYNELTKVKYVTEGMRKPAFLSGEQKKAIVDLLFKTNRKVTVKQLKEDYFKKIECFDSVEISGVEDRFNASLGTYHDLLKIIKDKDFLDNEENEDILEDIVLTLTLFEDREMIEERLKTYAHLFDDKVMKQLKRRRYTGWGRLSRKLINGIRDKQSGKTILDFLKSDGFANRNFMQLIHDDSLTFKEDIQKAQVSGQGDSLHEHIANLAGSPAIKKGILQTVKVVDELVKVMGRHKPENIVIEMARENQTTQKGQKNSRERMKRIEEGIKELGSQILKEHPVENTQLQNEKLYLYYLQNGRDMYVDQELDINRLSDYDVDHIVPQSFLKDDSIDNKVLTRSDKARGKSDNVPSEEVVKKMKNYWRQLLNAKLITQRKFDNLTKAERGGLSELDKAGFIKRQLVETRQITKHVAQILDSRMNTKYDENDKLIREVKVITLKSKLVSDFRKDFQFYKVREINNYHHAHDAYLNAVVGTALIKKYPKLESEFVYGDYKVYDVRKMIAKSEQEIGKATAKYFFYSNIMNFFKTEITLANGEIRKRPLIETNGETGEIVWDKGRDFATVRKVLSMPQVNIVKKTEVQTGGFSKESILPKRNSDKLIARKKDWDPKKYGGFDSPTVAYSVLVVAKVEKGKSKKLKSVKELLGITIMERSSFEKNPIDFLEAKGYKEVKKDLIIKLPKYSLFELENGRKRMLASAGELQKGNELALPSKYVNFLYLASHYEKLKGSPEDNEQKQLFVEQHKHYLDEIIEQISEFSKRVILADANLDKVLSAYNKHRDKPIREQAENIIHLFTLTNLGAPAAFKYFDTTIDRKRYTSTKEVLDATLIHQSITGLYETRIDLSQLGGDGGGGGPAPEAAAKGGMDPLQLLQPLEAEIKGTKLKAHWNSGATITCVPEAFLEDERPIQTMLIKTIHGEKQQDVYYLTFKVQGRKVEAEVLASPYDYILLNPSDVPWLMKKPLQLTVLVPLHEYQERLLQQTALPKEQKELLQKLFLKYDALWQHWENQVGHRRIKPHNIATGTLAPRPQKQYPINPKAKPSIQIVIDDLLKQGVLIQQNSTMNTPVYPVPKPDGKWRMVLDYREVNKTIPLIAAQNQHSAGILSSIYRGKYKTTLDLTNGFWAHPITPESYWLTAFTWQGKQYCWTRLPQGFLNSPALFNADVVDLLKEIPNVQAYVDDIYISHDDPQEHLEQLEKIFSILLNAGYVVSLKKSEIAQREVEFLGFNITKEGRGLTDTFKQKLLNITPPKDLKQLQSILGKLNFARNFIPNYSELVKPLYTIVAPANGKFISWTEDNSNQLQHIISVLNQADNLEERNPETRLIIKVNSSPSAGYIRYYNEGSKRPIMYVNYIFSKAEAKFTQTEKLLTTMHKGLIKAMDLAMGQEILVYSPIVSMTKIQRTPLPERKALPVRWITWMTYLEDPRIQFHYDKSLPELQQIPNVTEDVIAKTKHPSEFAMVFYTDGSAIKHPDVNKSHSAGMGIAQVQFIPEYKIVHQWSIPLGDHTAQLAEIAAVEFACKKALKISGPVLIVTDSFYVAESANKELPYWKSNGFLNNKKKPLRHVSKWKSIAECLQLKPDIIIMHEKGHQQPMTTLHTEGNNLADKLATQGSYVVHAGKRTADGSEFEKRTADGSEFESPKKKAKVE

SEQ ID NO: 7483 - protein, 2176 aa, synthetic construct
MPAAKRVKLDGGDKKYSIGLDIGTNSVGWAVITDEYKVPSKKFKVLGNTDRHSIKKNLIGALLFDSGETAEATRLKRTARRRYTRRKNRICYLQEIFSNEMAKVDDSFFHRLEESFLVEEDKKHERHPIFGNIVDEVAYHEKYPTIYHLRKKLVDSTDKADLRLIYLALAHMIKFRGHFLIEGDLNPDNSDVDKLFIQLVQTYNQLFEENPINASGVDAKAILSARLSKSRRLENLIAQLPGEKKNGLFGNLIALSLGLTPNFKSNFDLAEDAKLQLSKDTYDDDLDNLLAQIGDQYADLFLAAKNLSDAILLSDILRVNTEITKAPLSASMIKRYDEHHQDLTLLKALVRQQLPEKYKEIFFDQSKNGYAGYIDGGASQEEFYKFIKPILEKMDGTEELLVKLNREDLLRKQRTFDNGSIPHQIHLGELHAILRRQEDFYPFLKDNREKIEKILTFRIPYYVGPLARGNSRFAWMTRKSEETITPWNFEEVVDKGASAQSFIERMTNFDKNLPNEKVLPKHSLLYEYFTVYNELTKVKYVTEGMRKPAFLSGEQKKAIVDLLFKTNRKVTVKQLKEDYFKKIECFDSVEISGVEDRFNASLGTYHDLLKIIKDKDFLDNEENEDILEDIVLTLTLFEDREMIEERLKTYAHLFDDKVMKQLKRRRYTGWGRLSRKLINGIRDKQSGKTILDFLKSDGFANRNFMQLIHDDSLTFKEDIQKAQVSGQGDSLHEHIANLAGSPAIKKGILQTVKVVDELVKVMGRHKPENIVIEMARENQTTQKGQKNSRERMKRIEEGIKELGSQILKEHPVENTQLQNEKLYLYYLQNGRDMYVDQELDINRLSDYDVDHIVPQSFLKDDSIDNKVLTRSDKARGKSDNVPSEEVVKKMKNYWRQLLNAKLITQRKFDNLTKAERGGLSELDKAGFIKRQLVETRQITKHVAQILDSRMNTKYDENDKLIREVKVITLKSKLVSDFRKDFQFYKVREINNYHHAHDAYLNAVVGTALIKKYPKLESEFVYGDYKVYDVRKMIAKSEQEIGKATAKYFFYSNIMNFFKTEITLANGEIRKRPLIETNGETGEIVWDKGRDFATVRKVLSMPQVNIVKKTEVQTGGFSKESILPKRNSDKLIARKKDWDPKKYGGFDSPTVAYSVLVVAKVEKGKSKKLKSVKELLGITIMERSSFEKNPIDFLEAKGYKEVKKDLIIKLPKYSLFELENGRKRMLASAGELQKGNELALPSKYVNFLYLASHYEKLKGSPEDNEQKQLFVEQHKHYLDEIIEQISEFSKRVILADANLDKVLSAYNKHRDKPIREQAENIIHLFTLTNLGAPAAFKYFDTTIDRKRYTSTKEVLDATLIHQSITGLYETRIDLSQLGGDGGGGGPAPEAAAKGGMNPLQLLQPLPAEVKGTKLLAHWNSGATITCIPESFLEDEQPIKQTLIKTIHGEKQQNVYYLTFKVKGRKVEAEVIASPYEYILLSPTDVPWLTQQPLQLTILVPLQEYQDRILNKTALPEEQKQQLKALFTKYDNLWQHWENQVGHRKIRPHNIATGDYPPRPQKQYPINPKAKPSIQIVIDDLLKQGVLTPQNSTMNTPVYPVPKPDGRWRMVLDYREVNKTIPLTAAQNQHSAGILATIVRQKYKTTLDLANGFWAHPITPDSYWLTAFTWQGKQYCWTRLPQGFLNSPALFNADAVDLLKEVPNVQVYVDDIYLSHDNPHEHIQQLEKVFQILLQAGYVVSLKKSEIGQRTVEFLGFNITKEGRGLTDTFKTKLLNVTPPKDLKQLQSILGLLNFARNFIPNFAELVQTLYNLIASSPGKYIEWTEDNTKQLNKVIEALNTASNLEERLPDQRLVIKVNTSPSAGYVRYYNESGKKPIMYLNYVFSKAELKFSMLEKLLTTMHKALIKAMDLAMGQEILVYSPIVSMTKIQKTPLPERKALPIRWITWMTYLEDPRIQFHYDKTLPELKHIPDVYTSSIPPLKHPSQYEGVFCTDGSAIKSPDPTKSNNAGMGIVHAIYNPEYKILNQWSIPLGHHTAQMAEIAAVEFACKKALKVPGPVLVITDSFYVAESANKELPYWKSNGFVNNKKEPLKHISKWKSIAECLSIKPDITIQHEKGHQPINTSIHTEGNALADKLATQGSYVVNAGKRTADGSEFEKRTADGSEFESPKKKAKVE

SEQ ID NO: 7484 - protein, 2094 aa, synthetic construct
MPAAKRVKLDGGDKKYSIGLDIGTNSVGWAVITDEYKVPSKKFKVLGNTDRHSIKKNLIGALLFDSGETAEATRLKRTARRRYTRRKNRICYLQEIFSNEMAKVDDSFFHRLEESFLVEEDKKHERHPIFGNIVDEVAYHEKYPTIYHLRKKLVDSTDKADLRLIYLALAHMIKFRGHFLIEGDLNPDNSDVDKLFIQLVQTYNQLFEENPINASGVDAKAILSARLSKSRRLENLIAQLPGEKKNGLFGNLIALSLGLTPNFKSNFDLAEDAKLQLSKDTYDDDLDNLLAQIGDQYADLFLAAKNLSDAILLSDILRVNTEITKAPLSASMIKRYDEHHQDLTLLKALVRQQLPEKYKEIFFDQSKNGYAGYIDGGASQEEFYKFIKPILEKMDGTEELLVKLNREDLLRKQRTFDNGSIPHQIHLGELHAILRRQEDFYPFLKDNREKIEKILTFRIPYYVGPLARGNSRFAWMTRKSEETITPWNFEEVVDKGASAQSFIERMTNFDKNLPNEKVLPKHSLLYEYFTVYNELTKVKYVTEGMRKPAFLSGEQKKAIVDLLFKTNRKVTVKQLKEDYFKKIECFDSVEISGVEDRFNASLGTYHDLLKIIKDKDFLDNEENEDILEDIVLTLTLFEDREMIEERLKTYAHLFDDKVMKQLKRRRYTGWGRLSRKLINGIRDKQSGKTILDFLKSDGFANRNFMQLIHDDSLTFKEDIQKAQVSGQGDSLHEHIANLAGSPAIKKGILQTVKVVDELVKVMGRHKPENIVIEMARENQTTQKGQKNSRERMKRIEEGIKELGSQILKEHPVENTQLQNEKLYLYYLQNGRDMYVDQELDINRLSDYDVDHIVPQSFLKDDSIDNKVLTRSDKARGKSDNVPSEEVVKKMKNYWRQLLNAKLITQRKFDNLTKAERGGLSELDKAGFIKRQLVETRQITKHVAQILDSRMNTKYDENDKLIREVKVITLKSKLVSDFRKDFQFYKVREINNYHHAHDAYLNAVVGTALIKKYPKLESEFVYGDYKVYDVRKMIAKSEQEIGKATAKYFFYSNIMNFFKTEITLANGEIRKRPLIETNGETGEIVWDKGRDFATVRKVLSMPQVNIVKKTEVQTGGFSKESILPKRNSDKLIARKKDWDPKKYGGFDSPTVAYSVLVVAKVEKGKSKKLKSVKELLGITIMERSSFEKNPIDFLEAKGYKEVKKDLIIKLPKYSLFELENGRKRMLASAGELQKGNELALPSKYVNFLYLASHYEKLKGSPEDNEQKQLFVEQHKHYLDEIIEQISEFSKRVILADANLDKVLSAYNKHRDKPIREQAENIIHLFTLTNLGAPAAFKYFDTTIDRKRYTSTKEVLDATLIHQSITGLYETRIDLSQLGGDGGGGGPAPEAAAKGGVLNLEEEYRLHEKPVPSSIDPSWLQLFPTVWAERAGMGLANQVPPVVVELRSGASPVAVRQYPMSKEAREGIRPHIQRFLDLGVLVPCQSPWNTPLLPVKKPGTNDYRPVQDLREINKRVQDIHPTVPNPYNLLSSLPPSHTWYSVLDLKDAFFCLKLHPNSQPLFAFEWRDPEKGNTGQLTWTRLPQGFKNSPTLFNEALHRDLAPFRALNPQVVLLQYVDDLLVAAPTYRDCKEGTQKLLQELSKLGYRVSAKKAQLCQKEVTYLGYLLKEGKRWLTPARKATVMKIPPPTTPRQVREFLGKAGFCRLFIPGFASLAAPLYPLTKPSIPFIWTEEHQKAFDRIKEALLSAPALALPDLTKPFTLYVDERAGVARGVLTQTLGPWRRPVAYLSKKLDPVASGWPTCLKAVAAVALLLKDADKLTLGQNVTVIASHSLESIVRQPPDRWMTNARMTHYQSLLLNERVSFAPPAVLNPATLLPVESEATPVHRCSEILAEETGTRRDLKDQPLPGVPAWYTDGSSFIAEGKRRAGAAIVDGKRTVWASSLPEGTSAQKAELVALTQALRLAEGKDINIYTDSRYAFATAHIHGAIYKQRGWLTSAGKDIKNKEEILALLEAIHLPKRVAIIHCPGHQKGNDPVATGNRRADEAAKQAALSTRVLAETTKPAGKRTADGSEFEKRTADGSEFESPKKKAKVE

SEQ ID NO: 7485 - protein, 2096 aa, synthetic construct
MPAAKRVKLDGGDKKYSIGLDIGTNSVGWAVITDEYKVPSKKFKVLGNTDRHSIKKNLIGALLFDSGETAEATRLKRTARRRYTRRKNRICYLQEIFSNEMAKVDDSFFHRLEESFLVEEDKKHERHPIFGNIVDEVAYHEKYPTIYHLRKKLVDSTDKADLRLIYLALAHMIKFRGHFLIEGDLNPDNSDVDKLFIQLVQTYNQLFEENPINASGVDAKAILSARLSKSRRLENLIAQLPGEKKNGLFGNLIALSLGLTPNFKSNFDLAEDAKLQLSKDTYDDDLDNLLAQIGDQYADLFLAAKNLSDAILLSDILRVNTEITKAPLSASMIKRYDEHHQDLTLLKALVRQQLPEKYKEIFFDQSKNGYAGYIDGGASQEEFYKFIKPILEKMDGTEELLVKLNREDLLRKQRTFDNGSIPHQIHLGELHAILRRQEDFYPFLKDNREKIEKILTFRIPYYVGPLARGNSRFAWMTRKSEETITPWNFEEVVDKGASAQSFIERMTNFDKNLPNEKVLPKHSLLYEYFTVYNELTKVKYVTEGMRKPAFLSGEQKKAIVDLLFKTNRKVTVKQLKEDYFKKIECFDSVEISGVEDRFNASLGTYHDLLKIIKDKDFLDNEENEDILEDIVLTLTLFEDREMIEERLKTYAHLFDDKVMKQLKRRRYTGWGRLSRKLINGIRDKQSGKTILDFLKSDGFANRNFMQLIHDDSLTFKEDIQKAQVSGQGDSLHEHIANLAGSPAIKKGILQTVKVVDELVKVMGRHKPENIVIEMARENQTTQKGQKNSRERMKRIEEGIKELGSQILKEHPVENTQLQNEKLYLYYLQNGRDMYVDQELDINRLSDYDVDHIVPQSFLKDDSIDNKVLTRSDKARGKSDNVPSEEVVKKMKNYWRQLLNAKLITQRKFDNLTKAERGGLSELDKAGFIKRQLVETRQITKHVAQILDSRMNTKYDENDKLIREVKVITLKSKLVSDFRKDFQFYKVREINNYHHAHDAYLNAVVGTALIKKYPKLESEFVYGDYKVYDVRKMIAKSEQEIGKATAKYFFYSNIMNFFKTEITLANGEIRKRPLIETNGETGEIVWDKGRDFATVRKVLSMPQVNIVKKTEVQTGGFSKESILPKRNSDKLIARKKDWDPKKYGGFDSPTVAYSVLVVAKVEKGKSKKLKSVKELLGITIMERSSFEKNPIDFLEAKGYKEVKKDLIIKLPKYSLFELENGRKRMLASAGELQKGNELALPSKYVNFLYLASHYEKLKGSPEDNEQKQLFVEQHKHYLDEIIEQISEFSKRVILADANLDKVLSAYNKHRDKPIREQAENIIHLFTLTNLGAPAAFKYFDTTIDRKRYTSTKEVLDATLIHQSITGLYETRIDLSQLGGDGGGGGPAPEAAAKGGTLNIEDEYRLHETSKEPDVPLGSTWLSDFPQAWAETGGMGLAVRQAPLIIPLKATSTPVSIKQYPMSQEARLGIKPHIQRLLDQGILVPCQSPWNTPLLPVKKPGTNDYRPVQDLREVNKRVEDIHPTVPNPYNLLSGLPPSHQWYTVLDLKDAFFCLRLHPTSQPLFAFEWRDPEMGISGQLTWTRLPQGFKNSPTLFNEALHRDLADFRIQHPDLILLQYVDDLLLAATSEQDCQRGTRALLQTLGNLGYRASAKKAQICQKQVKYLGYLLKEGQRWLTEARKETVMGQPTPKTPRQLREFLGTAGFCRLWIPGFAEMAAPLYPLTKPGTLFNWGPDQQKAYQEIKQALLTAPALGLPDLTKPFELFVDEKQGYAKGVLTQKLGPWRRPVAYLSKKLDPVAAGWPPCLRMVAAIAVLTKDAGKLTMGQPLVILAPHAVEALVKQPPDRWLSNARMTHYQAMLLDTDRVQFGPVVALNPATLLPLPEKEAPHDCLEILAETHGTRPDLTDQPIPDADYTWYTDGSSFLQEGQRRAGAAVTTETEVIWARALPAGTSAQRAELIALTQALKMAEGKKLNVYTDSRYAFATAHVHGEIYRRRGWLTSEGREIKNKNEILALLKALFLPKRLSIIHCPGHQKGNSAEARGNRMADQAAREAAMKAVLETSTLLAGKRTADGSEFEKRTADGSEFESPKKKAKVE

SEQ ID NO: 7486 - protein, 2098 aa, synthetic construct
MPAAKRVKLDGGDKKYSIGLDIGTNSVGWAVITDEYKVPSKKFKVLGNTDRHSIKKNLIGALLFDSGETAEATRLKRTARRRYTRRKNRICYLQEIFSNEMAKVDDSFFHRLEESFLVEEDKKHERHPIFGNIVDEVAYHEKYPTIYHLRKKLVDSTDKADLRLIYLALAHMIKFRGHFLIEGDLNPDNSDVDKLFIQLVQTYNQLFEENPINASGVDAKAILSARLSKSRRLENLIAQLPGEKKNGLFGNLIALSLGLTPNFKSNFDLAEDAKLQLSKDTYDDDLDNLLAQIGDQYADLFLAAKNLSDAILLSDILRVNTEITKAPLSASMIKRYDEHHQDLTLLKALVRQQLPEKYKEIFFDQSKNGYAGYIDGGASQEEFYKFIKPILEKMDGTEELLVKLNREDLLRKQRTFDNGSIPHQIHLGELHAILRRQEDFYPFLKDNREKIEKILTFRIPYYVGPLARGNSRFAWMTRKSEETITPWNFEEVVDKGASAQSFIERMTNFDKNLPNEKVLPKHSLLYEYFTVYNELTKVKYVTEGMRKPAFLSGEQKKAIVDLLFKTNRKVTVKQLKEDYFKKIECFDSVEISGVEDRFNASLGTYHDLLKIIKDKDFLDNEENEDILEDIVLTLTLFEDREMIEERLKTYAHLFDDKVMKQLKRRRYTGWGRLSRKLINGIRDKQSGKTILDFLKSDGFANRNFMQLIHDDSLTFKEDIQKAQVSGQGDSLHEHIANLAGSPAIKKGILQTVKVVDELVKVMGRHKPENIVIEMARENQTTQKGQKNSRERMKRIEEGIKELGSQILKEHPVENTQLQNEKLYLYYLQNGRDMYVDQELDINRLSDYDVDHIVPQSFLKDDSIDNKVLTRSDKARGKSDNVPSEEVVKKMKNYWRQLLNAKLITQRKFDNLTKAERGGLSELDKAGFIKRQLVETRQITKHVAQILDSRMNTKYDENDKLIREVKVITLKSKLVSDFRKDFQFYKVREINNYHHAHDAYLNAVVGTALIKKYPKLESEFVYGDYKVYDVRKMIAKSEQEIGKATAKYFFYSNIMNFFKTEITLANGEIRKRPLIETNGETGEIVWDKGRDFATVRKVLSMPQVNIVKKTEVQTGGFSKESILPKRNSDKLIARKKDWDPKKYGGFDSPTVAYSVLVVAKVEKGKSKKLKSVKELLGITIMERSSFEKNPIDFLEAKGYKEVKKDLIIKLPKYSLFELENGRKRMLASAGELQKGNELALPSKYVNFLYLASHYEKLKGSPEDNEQKQLFVEQHKHYLDEIIEQISEFSKRVILADANLDKVLSAYNKHRDKPIREQAENIIHLFTLTNLGAPAAFKYFDTTIDRKRYTSTKEVLDATLIHQSITGLYETRIDLSQLGGDGGEAAAKGGGPAPGGTAPLEEEYRLFLEAPIQNVTLLEQWKREIPKVWAEINPPGLASTQAPIHVQLLSTALPVRVRQYPITLEAKRSLRETIRKFRAAGILRPVHSPWNTPLLPVRKSGTSEYRMVQDLREVNKRVETIHPTVPNPYTLLSLLPPDRIWYSVLDLKDAFFCIPLAPESQLIFAFEWADAEEGESGQLTWTRLPQGFKNSPTLFDEALNRDLQGFRLDHPSVSLLQYVDDLLIAADTQAACLSATRDLLMTLAELGYRVSGKKAQLCQEEVTYLGFKIHKGSRSLSNSRTQAILQIPVPKTKRQVREFLGTIGYCRLWIPGFAELAQPLYAATRGGNDPLVWGEKEEEAFQSLKLALTQPPALALPSLDKPFQLFVEETSGAAKGVLTQALGPWKRPVAYLSKRLDPVAAGWPRCLRAIAAAALLTREASKLTFGQDIEITSSHNLESLLRSPPDKWLTNARITQYQVLLLDPPRVRFKQTAALNPATLLPETDDTLPIHHCLDTLDSLTSTRPDLTDQPLAQAEATLFTDGSSYIRDGKRYAGAAVVTLDSVIWAEPLPIGTSAQKAELIALTKALEWSKDKSVNIYTDSRYAFATLHVHGMIYRERGLLTAGGKAIKNAPEILALLTAVWLPKRVAVMHCKGHQKDDAPTSTGNRRADEVAREVAIRPLSTQATISAGKRTADGSEFEKRTADGSEFESPKKKAKVE

SEQ ID NO: 7487 - protein, 2098 aa, synthetic construct
MPAAKRVKLDGGDKKYSIGLDIGTNSVGWAVITDEYKVPSKKFKVLGNTDRHSIKKNLIGALLFDSGETAEATRLKRTARRRYTRRKNRICYLQEIFSNEMAKVDDSFFHRLEESFLVEEDKKHERHPIFGNIVDEVAYHEKYPTIYHLRKKLVDSTDKADLRLIYLALAHMIKFRGHFLIEGDLNPDNSDVDKLFIQLVQTYNQLFEENPINASGVDAKAILSARLSKSRRLENLIAQLPGEKKNGLFGNLIALSLGLTPNFKSNFDLAEDAKLQLSKDTYDDDLDNLLAQIGDQYADLFLAAKNLSDAILLSDILRVNTEITKAPLSASMIKRYDEHHQDLTLLKALVRQQLPEKYKEIFFDQSKNGYAGYIDGGASQEEFYKFIKPILEKMDGTEELLVKLNREDLLRKQRTFDNGSIPHQIHLGELHAILRRQEDFYPFLKDNREKIEKILTFRIPYYVGPLARGNSRFAWMTRKSEETITPWNFEEVVDKGASAQSFIERMTNFDKNLPNEKVLPKHSLLYEYFTVYNELTKVKYVTEGMRKPAFLSGEQKKAIVDLLFKTNRKVTVKQLKEDYFKKIECFDSVEISGVEDRFNASLGTYHDLLKIIKDKDFLDNEENEDILEDIVLTLTLFEDREMIEERLKTYAHLFDDKVMKQLKRRRYTGWGRLSRKLINGIRDKQSGKTILDFLKSDGFANRNFMQLIHDDSLTFKEDIQKAQVSGQGDSLHEHIANLAGSPAIKKGILQTVKVVDELVKVMGRHKPENIVIEMARENQTTQKGQKNSRERMKRIEEGIKELGSQILKEHPVENTQLQNEKLYLYYLQNGRDMYVDQELDINRLSDYDVDHIVPQSFLKDDSIDNKVLTRSDKARGKSDNVPSEEVVKKMKNYWRQLLNAKLITQRKFDNLTKAERGGLSELDKAGFIKRQLVETRQITKHVAQILDSRMNTKYDENDKLIREVKVITLKSKLVSDFRKDFQFYKVREINNYHHAHDAYLNAVVGTALIKKYPKLESEFVYGDYKVYDVRKMIAKSEQEIGKATAKYFFYSNIMNFFKTEITLANGEIRKRPLIETNGETGEIVWDKGRDFATVRKVLSMPQVNIVKKTEVQTGGFSKESILPKRNSDKLIARKKDWDPKKYGGFDSPTVAYSVLVVAKVEKGKSKKLKSVKELLGITIMERSSFEKNPIDFLEAKGYKEVKKDLIIKLPKYSLFELENGRKRMLASAGELQKGNELALPSKYVNFLYLASHYEKLKGSPEDNEQKQLFVEQHKHYLDEIIEQISEFSKRVILADANLDKVLSAYNKHRDKPIREQAENIIHLFTLTNLGAPAAFKYFDTTIDRKRYTSTKEVLDATLIHQSITGLYETRIDLSQLGGDGGEAAAKGGGPAPGGTAPLEEEYRLFLEAPIQNVTLLEQWKREIPKVWAEINPPGLASTQAPIHVQLLSTALPVRVRQYPITLEAKRSLRETIRKFRAAGILRPVHSPWNTPLLPVRKSGTSEYRMVQDLREVNKRVETIHPTVPNPYTLLSLLPPDRIWYSVLDLKDAFFCIPLAPESQLIFAFEWADAEEGESGQLTWTRLPQGFKNSPTLFNEALNRDLQGFRLDHPSVSLLQYVDDLLIAADTQAACLSATRDLLMTLAELGYRVSGKKAQLCQEEVTYLGFKIHKGSRSLSNSRTQAILQIPVPKTKRQVREFLGTIGYCRLWIPGFAELAQPLYAATRPGNDPLVWGEKEEEAFQSLKLALTQPPALALPSLDKPFQLFVEETSGAAKGVLTQALGPWKRPVAYLSKRLDPVAAGWPRCLRAIAAAALLTREASKLTFGQDIEITSSHNLESLLRSPPDKWLTNARITQYQVLLLDPPRVRFKQTAALNPATLLPETDDTLPIHHCLDTLDSLTSTRPDLTDQPLAQAEATLFTDGSSYIRDGKRYAGAAVVTLDSVIWAEPLPIGTSAQKAELIALTKALEWSKDKSVNIYTDSRYAFATLHVHGMIYRERGWLTAGGKAIKNAPEILALLTAVWLPKRVAVMHCKGHQKDDAPTSTGNRRADEVAREVAIRPLSTQATISAGKRTADGSEFEKRTADGSEFESPKKKAKVE

SEQ ID NO: 7488 - protein, 2098 aa, synthetic construct
MPAAKRVKLDGGDKKYSIGLDIGTNSVGWAVITDEYKVPSKKFKVLGNTDRHSIKKNLIGALLFDSGETAEATRLKRTARRRYTRRKNRICYLQEIFSNEMAKVDDSFFHRLEESFLVEEDKKHERHPIFGNIVDEVAYHEKYPTIYHLRKKLVDSTDKADLRLIYLALAHMIKFRGHFLIEGDLNPDNSDVDKLFIQLVQTYNQLFEENPINASGVDAKAILSARLSKSRRLENLIAQLPGEKKNGLFGNLIALSLGLTPNFKSNFDLAEDAKLQLSKDTYDDDLDNLLAQIGDQYADLFLAAKNLSDAILLSDILRVNTEITKAPLSASMIKRYDEHHQDLTLLKALVRQQLPEKYKEIFFDQSKNGYAGYIDGGASQEEFYKFIKPILEKMDGTEELLVKLNREDLLRKQRTFDNGSIPHQIHLGELHAILRRQEDFYPFLKDNREKIEKILTFRIPYYVGPLARGNSRFAWMTRKSEETITPWNFEEVVDKGASAQSFIERMTNFDKNLPNEKVLPKHSLLYEYFTVYNELTKVKYVTEGMRKPAFLSGEQKKAIVDLLFKTNRKVTVKQLKEDYFKKIECFDSVEISGVEDRFNASLGTYHDLLKIIKDKDFLDNEENEDILEDIVLTLTLFEDREMIEERLKTYAHLFDDKVMKQLKRRRYTGWGRLSRKLINGIRDKQSGKTILDFLKSDGFANRNFMQLIHDDSLTFKEDIQKAQVSGQGDSLHEHIANLAGSPAIKKGILQTVKVVDELVKVMGRHKPENIVIEMARENQTTQKGQKNSRERMKRIEEGIKELGSQILKEHPVENTQLQNEKLYLYYLQNGRDMYVDQELDINRLSDYDVDHIVPQSFLKDDSIDNKVLTRSDKARGKSDNVPSEEVVKKMKNYWRQLLNAKLITQRKFDNLTKAERGGLSELDKAGFIKRQLVETRQITKHVAQILDSRMNTKYDENDKLIREVKVITLKSKLVSDFRKDFQFYKVREINNYHHAHDAYLNAVVGTALIKKYPKLESEFVYGDYKVYDVRKMIAKSEQEIGKATAKYFFYSNIMNFFKTEITLANGEIRKRPLIETNGETGEIVWDKGRDFATVRKVLSMPQVNIVKKTEVQTGGFSKESILPKRNSDKLIARKKDWDPKKYGGFDSPTVAYSVLVVAKVEKGKSKKLKSVKELLGITIMERSSFEKNPIDFLEAKGYKEVKKDLIIKLPKYSLFELENGRKRMLASAGELQKGNELALPSKYVNFLYLASHYEKLKGSPEDNEQKQLFVEQHKHYLDEIIEQISEFSKRVILADANLDKVLSAYNKHRDKPIREQAENIIHLFTLTNLGAPAAFKYFDTTIDRKRYTSTKEVLDATLIHQSITGLYETRIDLSQLGGDGGEAAAKGGGPAPGGTAPLEEEYRLFLEAPIQNVTLLEQWKREIPKVWAEINPPGLASTQAPIHVQLLSTALPVRVRQYPITLEAKRSLRETIRKFRAAGILRPVHSPWNTPLLPVRKSGTSEYRMVQDLREVNKRVETIHPTVPNPYTLLSLLPPDRIWYSVLDLKDAFFCIPLAPESQLIFAFEWADAEEGESGQLTWTRLPQGFKNSPTLFNEALNRDLQGFRLDHPSVSLLQYVDDLLIAADTQAACLSATRDLLMTLAELGYRVSGKKAQLCQEEVTYLGFKIHKGSRSLSNSRTQAILQIPVPKTKRQVREFLGKIGYCRLFIPGFAELAQPLYAATRPGNDPLVWGEKEEEAFQSLKLALTQPPALALPSLDKPFQLFVEETSGAAKGVLTQALGPWKRPVAYLSKRLDPVAAGWPRCLRAIAAAALLTREASKLTFGQDIEITSSHNLESLLRSPPDKWLTNARITQYQVLLLDPPRVRFKQTAALNPATLLPETDDTLPIHHCLDTLDSLTSTRPDLTDQPLAQAEATLFTDGSSYIRDGKRYAGAAVVTLDSVIWAEPLPIGTSAQKAELIALTKALEWSKDKSVNIYTDSRYAFATLHVHGMIYRERGWLTAGGKAIKNAPEILALLTAVWLPKRVAVMHCKGHQKDDAPTSTGNRRADEVAREVAIRPLSTQATISAGKRTADGSEFEKRTADGSEFESPKKKAKVE

SEQ ID NO: 7489 - protein, 2102 aa, synthetic construct
MPAAKRVKLDGGDKKYSIGLDIGTNSVGWAVITDEYKVPSKKFKVLGNTDRHSIKKNLIGALLFDSGETAEATRLKRTARRRYTRRKNRICYLQEIFSNEMAKVDDSFFHRLEESFLVEEDKKHERHPIFGNIVDEVAYHEKYPTIYHLRKKLVDSTDKADLRLIYLALAHMIKFRGHFLIEGDLNPDNSDVDKLFIQLVQTYNQLFEENPINASGVDAKAILSARLSKSRRLENLIAQLPGEKKNGLFGNLIALSLGLTPNFKSNFDLAEDAKLQLSKDTYDDDLDNLLAQIGDQYADLFLAAKNLSDAILLSDILRVNTEITKAPLSASMIKRYDEHHQDLTLLKALVRQQLPEKYKEIFFDQSKNGYAGYIDGGASQEEFYKFIKPILEKMDGTEELLVKLNREDLLRKQRTFDNGSIPHQIHLGELHAILRRQEDFYPFLKDNREKIEKILTFRIPYYVGPLARGNSRFAWMTRKSEETITPWNFEEVVDKGASAQSFIERMTNFDKNLPNEKVLPKHSLLYEYFTVYNELTKVKYVTEGMRKPAFLSGEQKKAIVDLLFKTNRKVTVKQLKEDYFKKIECFDSVEISGVEDRFNASLGTYHDLLKIIKDKDFLDNEENEDILEDIVLTLTLFEDREMIEERLKTYAHLFDDKVMKQLKRRRYTGWGRLSRKLINGIRDKQSGKTILDFLKSDGFANRNFMQLIHDDSLTFKEDIQKAQVSGQGDSLHEHIANLAGSPAIKKGILQTVKVVDELVKVMGRHKPENIVIEMARENQTTQKGQKNSRERMKRIEEGIKELGSQILKEHPVENTQLQNEKLYLYYLQNGRDMYVDQELDINRLSDYDVDHIVPQSFLKDDSIDNKVLTRSDKARGKSDNVPSEEVVKKMKNYWRQLLNAKLITQRKFDNLTKAERGGLSELDKAGFIKRQLVETRQITKHVAQILDSRMNTKYDENDKLIREVKVITLKSKLVSDFRKDFQFYKVREINNYHHAHDAYLNAVVGTALIKKYPKLESEFVYGDYKVYDVRKMIAKSEQEIGKATAKYFFYSNIMNFFKTEITLANGEIRKRPLIETNGETGEIVWDKGRDFATVRKVLSMPQVNIVKKTEVQTGGFSKESILPKRNSDKLIARKKDWDPKKYGGFDSPTVAYSVLVVAKVEKGKSKKLKSVKELLGITIMERSSFEKNPIDFLEAKGYKEVKKDLIIKLPKYSLFELENGRKRMLASAGELQKGNELALPSKYVNFLYLASHYEKLKGSPEDNEQKQLFVEQHKHYLDEIIEQISEFSKRVILADANLDKVLSAYNKHRDKPIREQAENIIHLFTLTNLGAPAAFKYFDTTIDRKRYTSTKEVLDATLIHQSITGLYETRIDLSQLGGDGGEAAAKGGGPAPGGTVSLQDEHRLFDIPVTTSLPDVWLQDFPQAWAETGGLGRAKCQAPIIIDLKPTAVPVSIKQYPMSLEAHMGIRQHIIKFLELGVLRPCRSPWNTPLLPVKKPGTQDYRPVQDLREINKRTVDIHPTVPNPYNLLSTLKPDYSWYTVLDLKDAFFCLPLAPQSQELFAFEWKDPERGISGQLTWTRLPQGFKNSPTLFDEALHRDLTDFRTQHPEVTLLQYVDDLLLAAPTKKACTQGTRHLLQELGEKGYRASAKKAQICQTKVTYLGYILSEGKRWLTPGRIETVARIPPPRNPREVREFLGTAGFCRLWIPGFAELAAPLYALTKESTPFTWQTEHQLAFEALKKALLSAPALGLPDTSKPFTLFLDERQGIAKGVLTQKLGPWKRPVAYLSKKLDPVAAGWPPCLRIMAATAMLVKDSAKLTLGQPLTVITPHTLEAIVRQPPDRWITNARLTHYQALLLDTDRVQFGPPVTLNPATLLPVPENQPSPHDCRQVLAETHGTREDLKDQELPDADHTWYTDGSSYLDSGTRRAGAAVVDGHNTIWAQSLPPGTSAQKAELIALTKALELSKGKKANIYTDSRYAFATAHTHGSIYERRGLLTSEGKEIKNKAEIIALLKALFLPQEVAIIHCPGHQKGQDPVAVGNRQADRVARQAAMAEVLTLATEPDNTSHITAGKRTADGSEFEKRTADGSEFESPKKKAKVE

SEQ ID NO: 7490 - protein, 2102 aa, synthetic construct
MPAAKRVKLDGGDKKYSIGLDIGTNSVGWAVITDEYKVPSKKFKVLGNTDRHSIKKNLIGALLFDSGETAEATRLKRTARRRYTRRKNRICYLQEIFSNEMAKVDDSFFHRLEESFLVEEDKKHERHPIFGNIVDEVAYHEKYPTIYHLRKKLVDSTDKADLRLIYLALAHMIKFRGHFLIEGDLNPDNSDVDKLFIQLVQTYNQLFEENPINASGVDAKAILSARLSKSRRLENLIAQLPGEKKNGLFGNLIALSLGLTPNFKSNFDLAEDAKLQLSKDTYDDDLDNLLAQIGDQYADLFLAAKNLSDAILLSDILRVNTEITKAPLSASMIKRYDEHHQDLTLLKALVRQQLPEKYKEIFFDQSKNGYAGYIDGGASQEEFYKFIKPILEKMDGTEELLVKLNREDLLRKQRTFDNGSIPHQIHLGELHAILRRQEDFYPFLKDNREKIEKILTFRIPYYVGPLARGNSRFAWMTRKSEETITPWNFEEVVDKGASAQSFIERMTNFDKNLPNEKVLPKHSLLYEYFTVYNELTKVKYVTEGMRKPAFLSGEQKKAIVDLLFKTNRKVTVKQLKEDYFKKIECFDSVEISGVEDRFNASLGTYHDLLKIIKDKDFLDNEENEDILEDIVLTLTLFEDREMIEERLKTYAHLFDDKVMKQLKRRRYTGWGRLSRKLINGIRDKQSGKTILDFLKSDGFANRNFMQLIHDDSLTFKEDIQKAQVSGQGDSLHEHIANLAGSPAIKKGILQTVKVVDELVKVMGRHKPENIVIEMARENQTTQKGQKNSRERMKRIEEGIKELGSQILKEHPVENTQLQNEKLYLYYLQNGRDMYVDQELDINRLSDYDVDHIVPQSFLKDDSIDNKVLTRSDKARGKSDNVPSEEVVKKMKNYWRQLLNAKLITQRKFDNLTKAERGGLSELDKAGFIKRQLVETRQITKHVAQILDSRMNTKYDENDKLIREVKVITLKSKLVSDFRKDFQFYKVREINNYHHAHDAYLNAVVGTALIKKYPKLESEFVYGDYKVYDVRKMIAKSEQEIGKATAKYFFYSNIMNFFKTEITLANGEIRKRPLIETNGETGEIVWDKGRDFATVRKVLSMPQVNIVKKTEVQTGGFSKESILPKRNSDKLIARKKDWDPKKYGGFDSPTVAYSVLVVAKVEKGKSKKLKSVKELLGITIMERSSFEKNPIDFLEAKGYKEVKKDLIIKLPKYSLFELENGRKRMLASAGELQKGNELALPSKYVNFLYLASHYEKLKGSPEDNEQKQLFVEQHKHYLDEIIEQISEFSKRVILADANLDKVLSAYNKHRDKPIREQAENIIHLFTLTNLGAPAAFKYFDTTIDRKRYTSTKEVLDATLIHQSITGLYETRIDLSQLGGDGGEAAAKGGGPAPGGTVSLQDEHRLFDIPVTTSLPDVWLQDFPQAWAETGGLGRAKCQAPIIIDLKPTAVPVSIKQYPMSLEAHMGIRQHIIKFLELGVLRPCRSPWNTPLLPVKKPGTQDYRPVQDLREINKRTVDIHPTVPNPYNLLSTLKPDYSWYTVLDLKDAFFCLPLAPQSQELFAFEWKDPERGISGQLTWTRLPQGFKNSPTLFNEALHRDLTDFRTQHPEVTLLQYVDDLLLAAPTKKACTQGTRHLLQELGEKGYRASAKKAQICQTKVTYLGYILSEGKRWLTPGRIETVARIPPPRNPREVREFLGTAGFCRLWIPGFAELAAPLYALTKPSTPFTWQTEHQLAFEALKKALLSAPALGLPDTSKPFTLFLDERQGIAKGVLTQKLGPWKRPVAYLSKKLDPVAAGWPPCLRIMAATAMLVKDSAKLTLGQPLTVITPHTLEAIVRQPPDRWITNARLTHYQALLLDTDRVQFGPPVTLNPATLLPVPENQPSPHDCRQVLAETHGTREDLKDQELPDADHTWYTDGSSYLDSGTRRAGAAVVDGHNTIWAQSLPPGTSAQKAELIALTKALELSKGKKANIYTDSRYAFATAHTHGSIYERRGWLTSEGKEIKNKAEIIALLKALFLPQEVAIIHCPGHQKGQDPVAVGNRQADRVARQAAMAEVLTLATEPDNTSHITAGKRTADGSEFEKRTADGSEFESPKKKAKVE

SEQ ID NO: 7491 - protein, 2173 aa, synthetic construct
MPAAKRVKLDGGDKKYSIGLDIGTNSVGWAVITDEYKVPSKKFKVLGNTDRHSIKKNLIGALLFDSGETAEATRLKRTARRRYTRRKNRICYLQEIFSNEMAKVDDSFFHRLEESFLVEEDKKHERHPIFGNIVDEVAYHEKYPTIYHLRKKLVDSTDKADLRLIYLALAHMIKFRGHFLIEGDLNPDNSDVDKLFIQLVQTYNQLFEENPINASGVDAKAILSARLSKSRRLENLIAQLPGEKKNGLFGNLIALSLGLTPNFKSNFDLAEDAKLQLSKDTYDDDLDNLLAQIGDQYADLFLAAKNLSDAILLSDILRVNTEITKAPLSASMIKRYDEHHQDLTLLKALVRQQLPEKYKEIFFDQSKNGYAGYIDGGASQEEFYKFIKPILEKMDGTEELLVKLNREDLLRKQRTFDNGSIPHQIHLGELHAILRRQEDFYPFLKDNREKIEKILTFRIPYYVGPLARGNSRFAWMTRKSEETITPWNFEEVVDKGASAQSFIERMTNFDKNLPNEKVLPKHSLLYEYFTVYNELTKVKYVTEGMRKPAFLSGEQKKAIVDLLFKTNRKVTVKQLKEDYFKKIECFDSVEISGVEDRFNASLGTYHDLLKIIKDKDFLDNEENEDILEDIVLTLTLFEDREMIEERLKTYAHLFDDKVMKQLKRRRYTGWGRLSRKLINGIRDKQSGKTILDFLKSDGFANRNFMQLIHDDSLTFKEDIQKAQVSGQGDSLHEHIANLAGSPAIKKGILQTVKVVDELVKVMGRHKPENIVIEMARENQTTQKGQKNSRERMKRIEEGIKELGSQILKEHPVENTQLQNEKLYLYYLQNGRDMYVDQELDINRLSDYDVDHIVPQSFLKDDSIDNKVLTRSDKARGKSDNVPSEEVVKKMKNYWRQLLNAKLITQRKFDNLTKAERGGLSELDKAGFIKRQLVETRQITKHVAQILDSRMNTKYDENDKLIREVKVITLKSKLVSDFRKDFQFYKVREINNYHHAHDAYLNAVVGTALIKKYPKLESEFVYGDYKVYDVRKMIAKSEQEIGKATAKYFFYSNIMNFFKTEITLANGEIRKRPLIETNGETGEIVWDKGRDFATVRKVLSMPQVNIVKKTEVQTGGFSKESILPKRNSDKLIARKKDWDPKKYGGFDSPTVAYSVLVVAKVEKGKSKKLKSVKELLGITIMERSSFEKNPIDFLEAKGYKEVKKDLIIKLPKYSLFELENGRKRMLASAGELQKGNELALPSKYVNFLYLASHYEKLKGSPEDNEQKQLFVEQHKHYLDEIIEQISEFSKRVILADANLDKVLSAYNKHRDKPIREQAENIIHLFTLTNLGAPAAFKYFDTTIDRKRYTSTKEVLDATLIHQSITGLYETRIDLSQLGGDGGEAAAKGGGPAPGGMDLLKPLTVERKGVKIKGYWNSQADITCVPKDLLQGEEPVRQQNVTTIHGTQEGDVYYVNLKIDGRRINTEVIGTTLDYAIITPGDVPWILKKPLELTIKLDLEEQQGTLLNNSILSKKGKEELKQLFEKYSALWQSWENQVGHRRIRPHKIATGTVKPTPQKQYHINPKAKPDIQIVINDLLKQGVLIQKESTMNTPVYPVPKPNGRWRMVLDYRAVNKVTPLIAVQNQHSYGILGSLFKGRYKTTIDLSNGFWAHPIVPEDYWITAFTWQGKQYCWTVLPQGFLNSPGLFTGDVVDLLQGIPNVEVYVDDVYISHDSEKEHLEYLDILFNRLKEAGYIISLKKSNIANSIVDFLGFQITNEGRGLTDTFKEKLENITAPTTLKQLQSILGLLNFARNFIPDFTELIAPLYALIPKSTKNYVPWQIEHSTTLETLITKLNGAEYLQGRKGDKTLIMKVNASYTTGYIRYYNEGEKKPISYVSIVFSKTELKFTELEKLLTTVHKGLLKALDLSMGQNIHVYSPIVSMQNIQKTPQTAKKALASRWLSWLSYLEDPRIRFFYDPQMPALKDLPAVDTGKDNKKHPSNFQHIFYTDGSAITSPTKEGHLNAGMGIVYFINKDGNLQKQQEWSISLGNHTAQFAEIAAFEFALKKCLPLGGNILVVTDSNYVAKAYNEELDVWASNGFVNNRKKPLKHISKWKSVADLKRLRPDVVVTHEPGHQKLDSSPHAYGNNLADQLATQASFKVHAGKRTADGSEFEKRTADGSEFESPKKKAKVE

SEQ ID NO: 7492 - protein, 2094 aa, synthetic construct
MPAAKRVKLDGGDKKYSIGLDIGTNSVGWAVITDEYKVPSKKFKVLGNTDRHSIKKNLIGALLFDSGETAEATRLKRTARRRYTRRKNRICYLQEIFSNEMAKVDDSFFHRLEESFLVEEDKKHERHPIFGNIVDEVAYHEKYPTIYHLRKKLVDSTDKADLRLIYLALAHMIKFRGHFLIEGDLNPDNSDVDKLFIQLVQTYNQLFEENPINASGVDAKAILSARLSKSRRLENLIAQLPGEKKNGLFGNLIALSLGLTPNFKSNFDLAEDAKLQLSKDTYDDDLDNLLAQIGDQYADLFLAAKNLSDAILLSDILRVNTEITKAPLSASMIKRYDEHHQDLTLLKALVRQQLPEKYKEIFFDQSKNGYAGYIDGGASQEEFYKFIKPILEKMDGTEELLVKLNREDLLRKQRTFDNGSIPHQIHLGELHAILRRQEDFYPFLKDNREKIEKILTFRIPYYVGPLARGNSRFAWMTRKSEETITPWNFEEVVDKGASAQSFIERMTNFDKNLPNEKVLPKHSLLYEYFTVYNELTKVKYVTEGMRKPAFLSGEQKKAIVDLLFKTNRKVTVKQLKEDYFKKIECFDSVEISGVEDRFNASLGTYHDLLKIIKDKDFLDNEENEDILEDIVLTLTLFEDREMIEERLKTYAHLFDDKVMKQLKRRRYTGWGRLSRKLINGIRDKQSGKTILDFLKSDGFANRNFMQLIHDDSLTFKEDIQKAQVSGQGDSLHEHIANLAGSPAIKKGILQTVKVVDELVKVMGRHKPENIVIEMARENQTTQKGQKNSRERMKRIEEGIKELGSQILKEHPVENTQLQNEKLYLYYLQNGRDMYVDQELDINRLSDYDVDHIVPQSFLKDDSIDNKVLTRSDKARGKSDNVPSEEVVKKMKNYWRQLLNAKLITQRKFDNLTKAERGGLSELDKAGFIKRQLVETRQITKHVAQILDSRMNTKYDENDKLIREVKVITLKSKLVSDFRKDFQFYKVREINNYHHAHDAYLNAVVGTALIKKYPKLESEFVYGDYKVYDVRKMIAKSEQEIGKATAKYFFYSNIMNFFKTEITLANGEIRKRPLIETNGETGEIVWDKGRDFATVRKVLSMPQVNIVKKTEVQTGGFSKESILPKRNSDKLIARKKDWDPKKYGGFDSPTVAYSVLVVAKVEKGKSKKLKSVKELLGITIMERSSFEKNPIDFLEAKGYKEVKKDLIIKLPKYSLFELENGRKRMLASAGELQKGNELALPSKYVNFLYLASHYEKLKGSPEDNEQKQLFVEQHKHYLDEIIEQISEFSKRVILADANLDKVLSAYNKHRDKPIREQAENIIHLFTLTNLGAPAAFKYFDTTIDRKRYTSTKEVLDATLIHQSITGLYETRIDLSQLGGDGGEAAAKGGGPAPGGVLNLEEEYRLHEKPVPSSIDPSWLQLFPTVWAERAGMGLANQVPPVVVELRSGASPVAVRQYPMSKEAREGIRPHIQKFLDLGVLVPCRSPWNTPLLPVKKPGTNDYRPVQDLREINKRVQDIHPTVPNPYNLLSSLPPSYTWYSVLDLKDAFFCLRLHPNSQPLFAFEWKDPEKGNTGQLTWTRLPQGFKNSPTLFDEALHRDLAPFRALNPQVVLLQYVDDLLVAAPTYEDCKKGTQKLLQELSKLGYRVSAKKAQLCQREVTYLGYLLKEGKRWLTPARKATVMKIPVPTTPRQVREFLGTAGFCRLWIPGFASLAAPLYPLTKESIPFIWTEEHQQAFDHIKKALLSAPALALPDLTKPFTLYIDERAGVARGVLTQTLGPWRRPVAYLSKKLDPVASGWPTCLKAVAAVALLLKDADKLTLGQNVTVIASHSLESIVRQPPDRWMTNARMTHYQSLLLNERVSFAPPAVLNPATLLPVESEATPVHRCSEILAEETGTRRDLEDQPLPGVPTWYTDGSSFITEGKRRAGAPIVDGKRTVWASSLPEGTSAQKAELVALTQALRLAEGKNINIYTDSRYAFATAHIHGAIYKQRGLLTSAGKDIKNKEEILALLEAIHLPRRVAIIHCPGHQRGSNPVATGNRRADEAAKQAALSTRVLAGTTKPAGKRTADGSEFEKRTADGSEFESPKKKAKVE

SEQ ID NO: 7493 - protein, 2218 aa, synthetic construct
MPAAKRVKLDGGDKKYSIGLDIGTNSVGWAVITDEYKVPSKKFKVLGNTDRHSIKKNLIGALLFDSGETAEATRLKRTARRRYTRRKNRICYLQEIFSNEMAKVDDSFFHRLEESFLVEEDKKHERHPIFGNIVDEVAYHEKYPTIYHLRKKLVDSTDKADLRLIYLALAHMIKFRGHFLIEGDLNPDNSDVDKLFIQLVQTYNQLFEENPINASGVDAKAILSARLSKSRRLENLIAQLPGEKKNGLFGNLIALSLGLTPNFKSNFDLAEDAKLQLSKDTYDDDLDNLLAQIGDQYADLFLAAKNLSDAILLSDILRVNTEITKAPLSASMIKRYDEHHQDLTLLKALVRQQLPEKYKEIFFDQSKNGYAGYIDGGASQEEFYKFIKPILEKMDGTEELLVKLNREDLLRKQRTFDNGSIPHQIHLGELHAILRRQEDFYPFLKDNREKIEKILTFRIPYYVGPLARGNSRFAWMTRKSEETITPWNFEEVVDKGASAQSFIERMTNFDKNLPNEKVLPKHSLLYEYFTVYNELTKVKYVTEGMRKPAFLSGEQKKAIVDLLFKTNRKVTVKQLKEDYFKKIECFDSVEISGVEDRFNASLGTYHDLLKIIKDKDFLDNEENEDILEDIVLTLTLFEDREMIEERLKTYAHLFDDKVMKQLKRRRYTGWGRLSRKLINGIRDKQSGKTILDFLKSDGFANRNFMQLIHDDSLTFKEDIQKAQVSGQGDSLHEHIANLAGSPAIKKGILQTVKVVDELVKVMGRHKPENIVIEMARENQTTQKGQKNSRERMKRIEEGIKELGSQILKEHPVENTQLQNEKLYLYYLQNGRDMYVDQELDINRLSDYDVDHIVPQSFLKDDSIDNKVLTRSDKARGKSDNVPSEEVVKKMKNYWRQLLNAKLITQRKFDNLTKAERGGLSELDKAGFIKRQLVETRQITKHVAQILDSRMNTKYDENDKLIREVKVITLKSKLVSDFRKDFQFYKVREINNYHHAHDAYLNAVVGTALIKKYPKLESEFVYGDYKVYDVRKMIAKSEQEIGKATAKYFFYSNIMNFFKTEITLANGEIRKRPLIETNGETGEIVWDKGRDFATVRKVLSMPQVNIVKKTEVQTGGFSKESILPKRNSDKLIARKKDWDPKKYGGFDSPTVAYSVLVVAKVEKGKSKKLKSVKELLGITIMERSSFEKNPIDFLEAKGYKEVKKDLIIKLPKYSLFELENGRKRMLASAGELQKGNELALPSKYVNFLYLASHYEKLKGSPEDNEQKQLFVEQHKHYLDEIIEQISEFSKRVILADANLDKVLSAYNKHRDKPIREQAENIIHLFTLTNLGAPAAFKYFDTTIDRKRYTSTKEVLDATLIHQSITGLYETRIDLSQLGGDGGEAAAKGGGPAPGGTLGDQGSRGSDPLPEPRVTLTVEGIPTEFLVNTGAEHSVLTKPMGKMGSKRTVVAGATGSKVYPWTTKRLLKIGQKQVTHSFLVIPECPAPLLGRDLLTKLKAQIQFSTEGPQVTWEDRPAMCLVLNLEEEYRLHEKPVPPSIDPSWLQLFPMVWAEKAGMGLANQVPPVVVELKSDASPVAVRQYPMSKEAREGIRPHIQRFLDLGILVPCQSPWNTPLLPVKKPGTNDYRPVQDLREVNKRVQDIHPTVPNPYNLLSSLPPSHTWYSVLDLKDAFFCLKLHPNSQPLFAFEWRDPEKGNTGQLTWTRLPQGFKNSPTLFDEALHRDLASFRALNPQVVMLQYVDDLLVAAPTYRDCKEGTRRLLQELSKLGYRVSAKKAQLCREEVTYLGYLLKGGKRWLTPARKATVMKIPTPTTPRQVREFLGTAGFCRLWIPGFASLAAPLYPLTREKVPFTWTEAHQEAFGRIKEALLSAPALALPDLTKPFALYVDEKEGVARGVLTQTLGPWRRPVAYLSKKLDPVASGWPTCLKAIAAVALLLKDADKLTLGQNVLVIAPHNLESIVRQPPDRWMTNARMTHYQSLLLNERVSFAPPAILNPATLLPVESDDTPIHICSEILAEETGTRPDLRDQPLPGVPAWYTDGSSFIMDGRRQAGAAIVDNKRTVWASNLPEGTSAQKAELIALTQALRLAEGKSINIYTDSRYAFATAHVHGAIYKQRGLLTSAGKDIKNKEEILALLEAIHLPKRVAIIHCPGHQRGTDPVATGNRKADEAAKQAAQSTRILTETTKNAGKRTADGSEFEKRTADGSEFESPKKKAKVE

SEQ ID NO: 7494 - protein, 2127 aa, synthetic construct
MPAAKRVKLDGGDKKYSIGLDIGTNSVGWAVITDEYKVPSKKFKVLGNTDRHSIKKNLIGALLFDSGETAEATRLKRTARRRYTRRKNRICYLQEIFSNEMAKVDDSFFHRLEESFLVEEDKKHERHPIFGNIVDEVAYHEKYPTIYHLRKKLVDSTDKADLRLIYLALAHMIKFRGHFLIEGDLNPDNSDVDKLFIQLVQTYNQLFEENPINASGVDAKAILSARLSKSRRLENLIAQLPGEKKNGLFGNLIALSLGLTPNFKSNFDLAEDAKLQLSKDTYDDDLDNLLAQIGDQYADLFLAAKNLSDAILLSDILRVNTEITKAPLSASMIKRYDEHHQDLTLLKALVRQQLPEKYKEIFFDQSKNGYAGYIDGGASQEEFYKFIKPILEKMDGTEELLVKLNREDLLRKQRTFDNGSIPHQIHLGELHAILRRQEDFYPFLKDNREKIEKILTFRIPYYVGPLARGNSRFAWMTRKSEETITPWNFEEVVDKGASAQSFIERMTNFDKNLPNEKVLPKHSLLYEYFTVYNELTKVKYVTEGMRKPAFLSGEQKKAIVDLLFKTNRKVTVKQLKEDYFKKIECFDSVEISGVEDRFNASLGTYHDLLKIIKDKDFLDNEENEDILEDIVLTLTLFEDREMIEERLKTYAHLFDDKVMKQLKRRRYTGWGRLSRKLINGIRDKQSGKTILDFLKSDGFANRNFMQLIHDDSLTFKEDIQKAQVSGQGDSLHEHIANLAGSPAIKKGILQTVKVVDELVKVMGRHKPENIVIEMARENQTTQKGQKNSRERMKRIEEGIKELGSQILKEHPVENTQLQNEKLYLYYLQNGRDMYVDQELDINRLSDYDVDHIVPQSFLKDDSIDNKVLTRSDKARGKSDNVPSEEVVKKMKNYWRQLLNAKLITQRKFDNLTKAERGGLSELDKAGFIKRQLVETRQITKHVAQILDSRMNTKYDENDKLIREVKVITLKSKLVSDFRKDFQFYKVREINNYHHAHDAYLNAVVGTALIKKYPKLESEFVYGDYKVYDVRKMIAKSEQEIGKATAKYFFYSNIMNFFKTEITLANGEIRKRPLIETNGETGEIVWDKGRDFATVRKVLSMPQVNIVKKTEVQTGGFSKESILPKRNSDKLIARKKDWDPKKYGGFDSPTVAYSVLVVAKVEKGKSKKLKSVKELLGITIMERSSFEKNPIDFLEAKGYKEVKKDLIIKLPKYSLFELENGRKRMLASAGELQKGNELALPSKYVNFLYLASHYEKLKGSPEDNEQKQLFVEQHKHYLDEIIEQISEFSKRVILADANLDKVLSAYNKHRDKPIREQAENIIHLFTLTNLGAPAAFKYFDTTIDRKRYTSTKEVLDATLIHQSITGLYETRIDLSQLGGDGGEAAAKGGGPAPGGLLGRDLLTKLKAQIQFSTEGPQVTWEDRPAMCLVLNLEEEYRLHEKPVPPSIDPSWLQLFPMVWAEKAGMGLANQVPPVVVELKSDASPVAVRQYPMSKEAREGIRPHIQRFLDLGILVPCQSPWNTPLLPVKKPGTNDYRPVQDLREVNKRVQDIHPTVPNPYNLLSSLPPSHTWYSVLDLKDAFFCLKLHPNSQPLFAFEWRDPEKGNTGQLTWTRLPQGFKNSPTLFNEALHRDLASFRALNPQVVMLQYVDDLLVAAPTYRDCKEGTRRLLQELSKLGYRVSAKKAQLCREEVTYLGYLLKGGKRWLTPARKATVMKIPTPTTPRQVREFLGKAGFCRLFIPGFASLAAPLYPLTRPKVPFTWTEAHQEAFGRIKEALLSAPALALPDLTKPFALYVDEKEGVARGVLTQTLGPWRRPVAYLSKKLDPVASGWPTCLKAIAAVALLLKDADKLTLGQNVLVIAPHNLESIVRQPPDRWMTNARMTHYQSLLLNERVSFAPPAILNPATLLPVESDDTPIHICSEILAEETGTRPDLRDQPLPGVPAWYTDGSSFIMDGRRQAGAAIVDNKRTVWASNLPEGTSAQKAELIALTQALRLAEGKSINIYTDSRYAFATAHVHGAIYKQRGWLTSAGKDIKNKEEILALLEAIHLPKRVAIIHCPGHQRGTDPVATGNRKADEAAKQAAQSTRILTETTKNAGKRTADGSEFEKRTADGSEFESPKKKAKVE

SEQ ID NO: 7495 - protein, 2096 aa, synthetic construct
MPAAKRVKLDGGDKKYSIGLDIGTNSVGWAVITDEYKVPSKKFKVLGNTDRHSIKKNLIGALLFDSGETAEATRLKRTARRRYTRRKNRICYLQEIFSNEMAKVDDSFFHRLEESFLVEEDKKHERHPIFGNIVDEVAYHEKYPTIYHLRKKLVDSTDKADLRLIYLALAHMIKFRGHFLIEGDLNPDNSDVDKLFIQLVQTYNQLFEENPINASGVDAKAILSARLSKSRRLENLIAQLPGEKKNGLFGNLIALSLGLTPNFKSNFDLAEDAKLQLSKDTYDDDLDNLLAQIGDQYADLFLAAKNLSDAILLSDILRVNTEITKAPLSASMIKRYDEHHQDLTLLKALVRQQLPEKYKEIFFDQSKNGYAGYIDGGASQEEFYKFIKPILEKMDGTEELLVKLNREDLLRKQRTFDNGSIPHQIHLGELHAILRRQEDFYPFLKDNREKIEKILTFRIPYYVGPLARGNSRFAWMTRKSEETITPWNFEEVVDKGASAQSFIERMTNFDKNLPNEKVLPKHSLLYEYFTVYNELTKVKYVTEGMRKPAFLSGEQKKAIVDLLFKTNRKVTVKQLKEDYFKKIECFDSVEISGVEDRFNASLGTYHDLLKIIKDKDFLDNEENEDILEDIVLTLTLFEDREMIEERLKTYAHLFDDKVMKQLKRRRYTGWGRLSRKLINGIRDKQSGKTILDFLKSDGFANRNFMQLIHDDSLTFKEDIQKAQVSGQGDSLHEHIANLAGSPAIKKGILQTVKVVDELVKVMGRHKPENIVIEMARENQTTQKGQKNSRERMKRIEEGIKELGSQILKEHPVENTQLQNEKLYLYYLQNGRDMYVDQELDINRLSDYDVDHIVPQSFLKDDSIDNKVLTRSDKARGKSDNVPSEEVVKKMKNYWRQLLNAKLITQRKFDNLTKAERGGLSELDKAGFIKRQLVETRQITKHVAQILDSRMNTKYDENDKLIREVKVITLKSKLVSDFRKDFQFYKVREINNYHHAHDAYLNAVVGTALIKKYPKLESEFVYGDYKVYDVRKMIAKSEQEIGKATAKYFFYSNIMNFFKTEITLANGEIRKRPLIETNGETGEIVWDKGRDFATVRKVLSMPQVNIVKKTEVQTGGFSKESILPKRNSDKLIARKKDWDPKKYGGFDSPTVAYSVLVVAKVEKGKSKKLKSVKELLGITIMERSSFEKNPIDFLEAKGYKEVKKDLIIKLPKYSLFELENGRKRMLASAGELQKGNELALPSKYVNFLYLASHYEKLKGSPEDNEQKQLFVEQHKHYLDEIIEQISEFSKRVILADANLDKVLSAYNKHRDKPIREQAENIIHLFTLTNLGAPAAFKYFDTTIDRKRYTSTKEVLDATLIHQSITGLYETRIDLSQLGGDGGEAAAKGGGPAPGGTLGIEDEYRLHETSTEPDVSLGSTWLSDFPQAWAETGGMGLAVRQAPLIIPLKATSTPVSIQQYPMSHEARLGIKPHIQRLLDQGILVPCQSPWNTPLLPVKKPGTNDYRPVQDLREVNKRVEDIHPTVPNPYNLLSGLPPSHQWYTVLDLKDAFFCLRLHPTSQPLFAFEWRDPGMGISGQLTWTRLPQGFKNSPTLFNEALHRDLADFRIQHPDLILLQYVDDILLAATSELDCQQGTRALLQTLGDLGYRASAKKAQICQKQVKYLGYLLREGQRWLTEARKETVMGQPVPKTPRQLREFLGTAGFCRLWIPGFAEMAAPLYPLTKPGTLFSWGPDQQKAYQEIKQALLTAPALGLPDLTKPFELFVDEKQGYAKGVLTQKLGPWRRPVAYLSKKLDPVAAGWPPCLRMVAAIAVLTKDAGKLTMGQPLVILAPHAVEALVKQPPDRWLSNARMTHYQAMLLDTDRVQFGPVVALNPATLLPLPEEGAPHDCLEILAETHGTRPDLTDQPIPDADHTWYTDGSSFLQEGQRKAGAAVTTETEVIWAGALPAGTSAQRAELIALTQALKMAEGKRLNVYTDSRYAFATAHIHGEIYRRRGWLTSEGREIKNKSEILALLKALFLPKRLSIIHCLGHQKGDSAEARGNRLADQAAREAAIKTPPDTSTLLAGKRTADGSEFEKRTADGSEFESPKKKAKVE

SEQ ID NO: 7496 - protein, 2096 aa, synthetic construct; identical to SEQ ID NO: 4535

SEQ ID NO: 7497 - protein, 2096 aa, synthetic construct; identical to SEQ ID NO: 4535

SEQ ID NO: 7498 - protein, 2176 aa, synthetic construct
MPAAKRVKLDGGDKKYSIGLDIGTNSVGWAVITDEYKVPSKKFKVLGNTDRHSIKKNLIGALLFDSGETAEATRLKRTARRRYTRRKNRICYLQEIFSNEMAKVDDSFFHRLEESFLVEEDKKHERHPIFGNIVDEVAYHEKYPTIYHLRKKLVDSTDKADLRLIYLALAHMIKFRGHFLIEGDLNPDNSDVDKLFIQLVQTYNQLFEENPINASGVDAKAILSARLSKSRRLENLIAQLPGEKKNGLFGNLIALSLGLTPNFKSNFDLAEDAKLQLSKDTYDDDLDNLLAQIGDQYADLFLAAKNLSDAILLSDILRVNTEITKAPLSASMIKRYDEHHQDLTLLKALVRQQLPEKYKEIFFDQSKNGYAGYIDGGASQEEFYKFIKPILEKMDGTEELLVKLNREDLLRKQRTFDNGSIPHQIHLGELHAILRRQEDFYPFLKDNREKIEKILTFRIPYYVGPLARGNSRFAWMTRKSEETITPWNFEEVVDKGASAQSFIERMTNFDKNLPNEKVLPKHSLLYEYFTVYNELTKVKYVTEGMRKPAFLSGEQKKAIVDLLFKTNRKVTVKQLKEDYFKKIECFDSVEISGVEDRFNASLGTYHDLLKIIKDKDFLDNEENEDILEDIVLTLTLFEDREMIEERLKTYAHLFDDKVMKQLKRRRYTGWGRLSRKLINGIRDKQSGKTILDFLKSDGFANRNFMQLIHDDSLTFKEDIQKAQVSGQGDSLHEHIANLAGSPAIKKGILQTVKVVDELVKVMGRHKPENIVIEMARENQTTQKGQKNSRERMKRIEEGIKELGSQILKEHPVENTQLQNEKLYLYYLQNGRDMYVDQELDINRLSDYDVDHIVPQSFLKDDSIDNKVLTRSDKARGKSDNVPSEEVVKKMKNYWRQLLNAKLITQRKFDNLTKAERGGLSELDKAGFIKRQLVETRQITKHVAQILDSRMNTKYDENDKLIREVKVITLKSKLVSDFRKDFQFYKVREINNYHHAHDAYLNAVVGTALIKKYPKLESEFVYGDYKVYDVRKMIAKSEQEIGKATAKYFFYSNIMNFFKTEITLANGEIRKRPLIETNGETGEIVWDKGRDFATVRKVLSMPQVNIVKKTEVQTGGFSKESILPKRNSDKLIARKKDWDPKKYGGFDSPTVAYSVLVVAKVEKGKSKKLKSVKELLGITIMERSSFEKNPIDFLEAKGYKEVKKDLIIKLPKYSLFELENGRKRMLASAGELQKGNELALPSKYVNFLYLASHYEKLKGSPEDNEQKQLFVEQHKHYLDEIIEQISEFSKRVILADANLDKVLSAYNKHRDKPIREQAENIIHLFTLTNLGAPAAFKYFDTTIDRKRYTSTKEVLDATLIHQSITGLYETRIDLSQLGGDGGEAAAKGGGPAPGGMNPLQLLQPLPAEVKGTKLLAHWNSGATITCIPESFLEDEQPIKQTLIKTIHGEKQQNVYYLTFKVKGRKVEAEVIASPYEYILLSPTDVPWLTQQPLQLTILVPLQEYQDRILNKTALPEEQKQQLKALFTKYDNLWQHWENQVGHRKIRPHNIATGDYPPRPQKQYPINPKAKPSIQIVIDDLLKQGVLTPQNSTMNTPVYPVPKPDGRWRMVLDYREVNKTIPLTAAQNQHSAGILATIVRQKYKTTLDLANGFWAHPITPDSYWLTAFTWQGKQYCWTRLPQGFLNSPALFTADAVDLLKEVPNVQVYVDDIYLSHDNPHEHIQQLEKVFQILLQAGYVVSLKKSEIGQRTVEFLGFNITKEGRGLTDTFKTKLLNVTPPKDLKQLQSILGLLNFARNFIPNFAELVQTLYNLIASSKGKYIEWTEDNTKQLNKVIEALNTASNLEERLPDQRLVIKVNTSPSAGYVRYYNESGKKPIMYLNYVFSKAELKFSMLEKLLTTMHKALIKAMDLAMGQEILVYSPIVSMTKIQKTPLPERKALPIRWITWMTYLEDPRIQFHYDKTLPELKHIPDVYTSSIPPLKHPSQYEGVFCTDGSAIKSPDPTKSNNAGMGIVHAIYNPEYKILNQWSIPLGHHTAQMAEIAAVEFACKKALKVPGPVLVITDSFYVAESANKELPYWKSNGFVNNKKEPLKHISKWKSIAECLSIKPDITIQHEKGHQPINTSIHTEGNALADKLATQGSYVVNAGKRTADGSEFEKRTADGSEFESPKKKAKVE

SEQ ID NO: 7499 - protein, 2094 aa, synthetic construct
MPAAKRVKLDGGDKKYSIGLDIGTNSVGWAVITDEYKVPSKKFKVLGNTDRHSIKKNLIGALLFDSGETAEATRLKRTARRRYTRRKNRICYLQEIFSNEMAKVDDSFFHRLEESFLVEEDKKHERHPIFGNIVDEVAYHEKYPTIYHLRKKLVDSTDKADLRLIYLALAHMIKFRGHFLIEGDLNPDNSDVDKLFIQLVQTYNQLFEENPINASGVDAKAILSARLSKSRRLENLIAQLPGEKKNGLFGNLIALSLGLTPNFKSNFDLAEDAKLQLSKDTYDDDLDNLLAQIGDQYADLFLAAKNLSDAILLSDILRVNTEITKAPLSASMIKRYDEHHQDLTLLKALVRQQLPEKYKEIFFDQSKNGYAGYIDGGASQEEFYKFIKPILEKMDGTEELLVKLNREDLLRKQRTFDNGSIPHQIHLGELHAILRRQEDFYPFLKDNREKIEKILTFRIPYYVGPLARGNSRFAWMTRKSEETITPWNFEEVVDKGASAQSFIERMTNFDKNLPNEKVLPKHSLLYEYFTVYNELTKVKYVTEGMRKPAFLSGEQKKAIVDLLFKTNRKVTVKQLKEDYFKKIECFDSVEISGVEDRFNASLGTYHDLLKIIKDKDFLDNEENEDILEDIVLTLTLFEDREMIEERLKTYAHLFDDKVMKQLKRRRYTGWGRLSRKLINGIRDKQSGKTILDFLKSDGFANRNFMQLIHDDSLTFKEDIQKAQVSGQGDSLHEHIANLAGSPAIKKGILQTVKVVDELVKVMGRHKPENIVIEMARENQTTQKGQKNSRERMKRIEEGIKELGSQILKEHPVENTQLQNEKLYLYYLQNGRDMYVDQELDINRLSDYDVDHIVPQSFLKDDSIDNKVLTRSDKARGKSDNVPSEEVVKKMKNYWRQLLNAKLITQRKFDNLTKAERGGLSELDKAGFIKRQLVETRQITKHVAQILDSRMNTKYDENDKLIREVKVITLKSKLVSDFRKDFQFYKVREINNYHHAHDAYLNAVVGTALIKKYPKLESEFVYGDYKVYDVRKMIAKSEQEIGKATAKYFFYSNIMNFFKTEITLANGEIRKRPLIETNGETGEIVWDKGRDFATVRKVLSMPQVNIVKKTEVQTGGFSKESILPKRNSDKLIARKKDWDPKKYGGFDSPTVAYSVLVVAKVEKGKSKKLKSVKELLGITIMERSSFEKNPIDFLEAKGYKEVKKDLIIKLPKYSLFELENGRKRMLASAGELQKGNELALPSKYVNFLYLASHYEKLKGSPEDNEQKQLFVEQHKHYLDEIIEQISEFSKRVILADANLDKVLSAYNKHRDKPIREQAENIIHLFTLTNLGAPAAFKYFDTTIDRKRYTSTKEVLDATLIHQSITGLYETRIDLSQLGGDGGEAAAKGGGPAPGGVLNLEEEYRLHEKPVPSSIDPSWLQLFPTVWAERAGMGLANQVPPVVVELRSGASPVAVRQYPMSKEAREGIRPHIQRFLDLGVLVPCQSPWNTPLLPVKKPGTNDYRPVQDLREINKRVQDIHPTVPNPYNLLSSLPPSHTWYSVLDLKDAFFCLKLHPNSQPLFAFEWRDPEKGNTGQLTWTRLPQGFKNSPTLFNEALHRDLAPFRALNPQVVLLQYVDDLLVAAPTYRDCKEGTQKLLQELSKLGYRVSAKKAQLCQKEVTYLGYLLKEGKRWLTPARKATVMKIPPPTTPRQVREFLGKAGFCRLFIPGFASLAAPLYPLTKPSIPFIWTEEHQKAFDRIKEALLSAPALALPDLTKPFTLYVDERAGVARGVLTQTLGPWRRPVAYLSKKLDPVASGWPTCLKAVAAVALLLKDADKLTLGQNVTVIASHSLESIVRQPPDRWMTNARMTHYQSLLLNERVSFAPPAVLNPATLLPVESEATPVHRCSEILAEETGTRRDLKDQPLPGVPAWYTDGSSFIAEGKRRAGAAIVDGKRTVWASSLPEGTSAQKAELVALTQALRLAEGKDINIYTDSRYAFATAHIHGAIYKQRGWLTSAGKDIKNKEEILALLEAIHLPKRVAIIHCPGHQKGNDPVATGNRRADEAAKQAALSTRVLAETTKPAGKRTADGSEFEKRTADGSEFESPKKKAKVE

SEQ ID NO: 7500 - protein, 2098 aa, synthetic construct
MPAAKRVKLDGGDKKYSIGLDIGTNSVGWAVITDEYKVPSKKFKVLGNTDRHSIKKNLIGALLFDSGETAEATRLKRTARRRYTRRKNRICYLQEIFSNEMAKVDDSFFHRLEESFLVEEDKKHERHPIFGNIVDEVAYHEKYPTIYHLRKKLVDSTDKADLRLIYLALAHMIKFRGHFLIEGDLNPDNSDVDKLFIQLVQTYNQLFEENPINASGVDAKAILSARLSKSRRLENLIAQLPGEKKNGLFGNLIALSLGLTPNFKSNFDLAEDAKLQLSKDTYDDDLDNLLAQIGDQYADLFLAAKNLSDAILLSDILRVNTEITKAPLSASMIKRYDEHHQDLTLLKALVRQQLPEKYKEIFFDQSKNGYAGYIDGGASQEEFYKFIKPILEKMDGTEELLVKLNREDLLRKQRTFDNGSIPHQIHLGELHAILRRQEDFYPFLKDNREKIEKILTFRIPYYVGPLARGNSRFAWMTRKSEETITPWNFEEVVDKGASAQSFIERMTNFDKNLPNEKVLPKHSLLYEYFTVYNELTKVKYVTEGMRKPAFLSGEQKKAIVDLLFKTNRKVTVKQLKEDYFKKIECFDSVEISGVEDRFNASLGTYHDLLKIIKDKDFLDNEENEDILEDIVLTLTLFEDREMIEERLKTYAHLFDDKVMKQLKRRRYTGWGRLSRKLINGIRDKQSGKTILDFLKSDGFANRNFMQLIHDDSLTFKEDIQKAQVSGQGDSLHEHIANLAGSPAIKKGILQTVKVVDELVKVMGRHKPENIVIEMARENQTTQKGQKNSRERMKRIEEGIKELGSQILKEHPVENTQLQNEKLYLYYLQNGRDMYVDQELDINRLSDYDVDHIVPQSFLKDDSIDNKVLTRSDKARGKSDNVPSEEVVKKMKNYWRQLLNAKLITQRKFDNLTKAERGGLSELDKAGFIKRQLVETRQITKHVAQILDSRMNTKYDENDKLIREVKVITLKSKLVSDFRKDFQFYKVREINNYHHAHDAYLNAVVGTALIKKYPKLESEFVYGDYKVYDVRKMIAKSEQEIGKATAKYFFYSNIMNFFKTEITLANGEIRKRPLIETNGETGEIVWDKGRDFATVRKVLSMPQVNIVKKTEVQTGGFSKESILPKRNSDKLIARKKDWDPKKYGGFDSPTVAYSVLVVAKVEKGKSKKLKSVKELLGITIMERSSFEKNPIDFLEAKGYKEVKKDLIIKLPKYSLFELENGRKRMLASAGELQKGNELALPSKYVNFLYLASHYEKLKGSPEDNEQKQLFVEQHKHYLDEIIEQISEFSKRVILADANLDKVLSAYNKHRDKPIREQAENIIHLFTLTNLGAPAAFKYFDTTIDRKRYTSTKEVLDATLIHQSITGLYETRIDLSQLGGDGGEAAAKPAPGGGGGTAPLEEEYRLFLEAPIQNVTLLEQWKREIPKVWAEINPPGLASTQAPIHVQLLSTALPVRVRQYPITLEAKRSLRETIRKFRAAGILRPVHSPWNTPLLPVRKSGTSEYRMVQDLREVNKRVETIHPTVPNPYTLLSLLPPDRIWYSVLDLKDAFFCIPLAPESQLIFAFEWADAEEGESGQLTWTRLPQGFKNSPTLFNEALNRDLQGFRLDHPSVSLLQYVDDLLIAADTQAACLSATRDLLMTLAELGYRVSGKKAQLCQEEVTYLGFKIHKGSRSLSNSRTQAILQIPVPKTKRQVREFLGKIGYCRLFIPGFAELAQPLYAATRPGNDPLVWGEKEEEAFQSLKLALTQPPALALPSLDKPFQLFVEETSGAAKGVLTQALGPWKRPVAYLSKRLDPVAAGWPRCLRAIAAAALLTREASKLTFGQDIEITSSHNLESLLRSPPDKWLTNARITQYQVLLLDPPRVRFKQTAALNPATLLPETDDTLPIHHCLDTLDSLTSTRPDLTDQPLAQAEATLFTDGSSYIRDGKRYAGAAVVTLDSVIWAEPLPIGTSAQKAELIALTKALEWSKDKSVNIYTDSRYAFATLHVHGMIYRERGWLTAGGKAIKNAPEILALLTAVWLPKRVAVMHCKGHQKDDAPTSTGNRRADEVAREVAIRPLSTQATISAGKRTADGSEFEKRTADGSEFESPKKKAKVE

SEQ ID NO: 7501 - protein, 2102 aa, synthetic construct
MPAAKRVKLDGGDKKYSIGLDIGTNSVGWAVITDEYKVPSKKFKVLGNTDRHSIKKNLIGALLFDSGETAEATRLKRTARRRYTRRKNRICYLQEIFSNEMAKVDDSFFHRLEESFLVEEDKKHERHPIFGNIVDEVAYHEKYPTIYHLRKKLVDSTDKADLRLIYLALAHMIKFRGHFLIEGDLNPDNSDVDKLFIQLVQTYNQLFEENPINASGVDAKAILSARLSKSRRLENLIAQLPGEKKNGLFGNLIALSLGLTPNFKSNFDLAEDAKLQLSKDTYDDDLDNLLAQIGDQYADLFLAAKNLSDAILLSDILRVNTEITKAPLSASMIKRYDEHHQDLTLLKALVRQQLPEKYKEIFFDQSKNGYAGYIDGGASQEEFYKFIKPILEKMDGTEELLVKLNREDLLRKQRTFDNGSIPHQIHLGELHAILRRQEDFYPFLKDNREKIEKILTFRIPYYVGPLARGNSRFAWMTRKSEETITPWNFEEVVDKGASAQSFIERMTNFDKNLPNEKVLPKHSLLYEYFTVYNELTKVKYVTEGMRKPAFLSGEQKKAIVDLLFKTNRKVTVKQLKEDYFKKIECFDSVEISGVEDRFNASLGTYHDLLKIIKDKDFLDNEENEDILEDIVLTLTLFEDREMIEERLKTYAHLFDDKVMKQLKRRRYTGWGRLSRKLINGIRDKQSGKTILDFLKSDGFANRNFMQLIHDDSLTFKEDIQKAQVSGQGDSLHEHIANLAGSPAIKKGILQTVKVVDELVKVMGRHKPENIVIEMARENQTTQKGQKNSRERMKRIEEGIKELGSQILKEHPVENTQLQNEKLYLYYLQNGRDMYVDQELDINRLSDYDVDHIVPQSFLKDDSIDNKVLTRSDKARGKSDNVPSEEVVKKMKNYWRQLLNAKLITQRKFDNLTKAERGGLSELDKAGFIKRQLVETRQITKHVAQILDSRMNTKYDENDKLIREVKVITLKSKLVSDFRKDFQFYKVREINNYHHAHDAYLNAVVGTALIKKYPKLESEFVYGDYKVYDVRKMIAKSEQEIGKATAKYFFYSNIMNFFKTEITLANGEIRKRPLIETNGETGEIVWDKGRDFATVRKVLSMPQVNIVKKTEVQTGGFSKESILPKRNSDKLIARKKDWDPKKYGGFDSPTVAYSVLVVAKVEKGKSKKLKSVKELLGITIMERSSFEKNPIDFLEAKGYKEVKKDLIIKLPKYSLFELENGRKRMLASAGELQKGNELALPSKYVNFLYLASHYEKLKGSPEDNEQKQLFVEQHKHYLDEIIEQISEFSKRVILADANLDKVLSAYNKHRDKPIREQAENIIHLFTLTNLGAPAAFKYFDTTIDRKRYTSTKEVLDATLIHQSITGLYETRIDLSQLGGDGGEAAAKPAPGGGGGTVSLQDEHRLFDIPVTTSLPDVWLQDFPQAWAETGGLGRAKCQAPIIIDLKPTAVPVSIKQYPMSLEAHMGIRQHIIKFLELGVLRPCRSPWNTPLLPVKKPGTQDYRPVQDLREINKRTVDIHPTVPNPYNLLSTLKPDYSWYTVLDLKDAFFCLPLAPQSQELFAFEWKDPERGISGQLTWTRLPQGFKNSPTLFNEALHRDLTDFRTQHPEVTLLQYVDDLLLAAPTKKACTQGTRHLLQELGEKGYRASAKKAQICQTKVTYLGYILSEGKRWLTPGRIETVARIPPPRNPREVREFLGKAGFCRLFIPGFAELAAPLYALTKPSTPFTWQTEHQLAFEALKKALLSAPALGLPDTSKPFTLFLDERQGIAKGVLTQKLGPWKRPVAYLSKKLDPVAAGWPPCLRIMAATAMLVKDSAKLTLGQPLTVITPHTLEAIVRQPPDRWITNARLTHYQALLLDTDRVQFGPPVTLNPATLLPVPENQPSPHDCRQVLAETHGTREDLKDQELPDADHTWYTDGSSYLDSGTRRAGAAVVDGHNTIWAQSLPPGTSAQKAELIALTKALELSKGKKANIYTDSRYAFATAHTHGSIYERRGWLTSEGKEIKNKAEIIALLKALFLPQEVAIIHCPGHQKGQDPVAVGNRQADRVARQAAMAEVLTLATEPDNTSHITAGKRTADGSEFEKRTADGSEFESPKKKAKVE

SEQ ID NO: 7502 - protein, 2095 aa, synthetic construct
MPAAKRVKLDGGDKKYSIGLDIGTNSVGWAVITDEYKVPSKKFKVLGNTDRHSIKKNLIGALLFDSGETAEATRLKRTARRRYTRRKNRICYLQEIFSNEMAKVDDSFFHRLEESFLVEEDKKHERHPIFGNIVDEVAYHEKYPTIYHLRKKLVDSTDKADLRLIYLALAHMIKFRGHFLIEGDLNPDNSDVDKLFIQLVQTYNQLFEENPINASGVDAKAILSARLSKSRRLENLIAQLPGEKKNGLFGNLIALSLGLTPNFKSNFDLAEDAKLQLSKDTYDDDLDNLLAQIGDQYADLFLAAKNLSDAILLSDILRVNTEITKAPLSASMIKRYDEHHQDLTLLKALVRQQLPEKYKEIFFDQSKNGYAGYIDGGASQEEFYKFIKPILEKMDGTEELLVKLNREDLLRKQRTFDNGSIPHQIHLGELHAILRRQEDFYPFLKDNREKIEKILTFRIPYYVGPLARGNSRFAWMTRKSEETITPWNFEEVVDKGASAQSFIERMTNFDKNLPNEKVLPKHSLLYEYFTVYNELTKVKYVTEGMRKPAFLSGEQKKAIVDLLFKTNRKVTVKQLKEDYFKKIECFDSVEISGVEDRFNASLGTYHDLLKIIKDKDFLDNEENEDILEDIVLTLTLFEDREMIEERLKTYAHLFDDKVMKQLKRRRYTGWGRLSRKLINGIRDKQSGKTILDFLKSDGFANRNFMQLIHDDSLTFKEDIQKAQVSGQGDSLHEHIANLAGSPAIKKGILQTVKVVDELVKVMGRHKPENIVIEMARENQTTQKGQKNSRERMKRIEEGIKELGSQILKEHPVENTQLQNEKLYLYYLQNGRDMYVDQELDINRLSDYDVDHIVPQSFLKDDSIDNKVLTRSDKARGKSDNVPSEEVVKKMKNYWRQLLNAKLITQRKFDNLTKAERGGLSELDKAGFIKRQLVETRQITKHVAQILDSRMNTKYDENDKLIREVKVITLKSKLVSDFRKDFQFYKVREINNYHHAHDAYLNAVVGTALIKKYPKLESEFVYGDYKVYDVRKMIAKSEQEIGKATAKYFFYSNIMNFFKTEITLANGEIRKRPLIETNGETGEIVWDKGRDFATVRKVLSMPQVNIVKKTEVQTGGFSKESILPKRNSDKLIARKKDWDPKKYGGFDSPTVAYSVLVVAKVEKGKSKKLKSVKELLGITIMERSSFEKNPIDFLEAKGYKEVKKDLIIKLPKYSLFELENGRKRMLASAGELQKGNELALPSKYVNFLYLASHYEKLKGSPEDNEQKQLFVEQHKHYLDEIIEQISEFSKRVILADANLDKVLSAYNKHRDKPIREQAENIIHLFTLTNLGAPAAFKYFDTTIDRKRYTSTKEVLDATLIHQSITGLYETRIDLSQLGGDGGEAAAKPAPGGGGGTLQLEEEYRLFEPESTQKQEMDIWLKNFPQAWAETGGMGTAHCQAPVLIQLKATATPISIRQYPMPHEAYQGIKPHIRRMLDQGILKPCQSPWNTPLLPVKKPGTEDYRPVQDLREVNKRVEDIHPTVPNPYNLLSTLPPSHPWYTVLDLKDAFFCLRLHSESQLLFAFEWRDPEIGLSGQLTWTRLPQGFKNSPTLFNEALHSDLADFRVRYPALVLLQYVDDLLLAAATRTECLEGTKALLETLGNKGYRASAKKAQICLQEVTYLGYSLKDGQRWLTKARKEAILSIPVPKNSRQVREFLGKAGYCRLFIPGFAELAAPLYPLTRPGTLFQWGTEQQLAFEDIKKALLSSPALGLPDITKPFELFIDENSGFAKGVLVQKLGPWKRPVAYLSKKLDTVASGWPPCLRMVAAIAILVKDAGKLTLGQPLTILTSHPVEALVRQPPNKWLSNARMTHYQAMLLDAERVHFGPTVSLNPATLLPLPSGGNHHDCLQILAETHGTRPDLTDQPLPDADLTWYTDGSSFIRNGEREAGAAVTTESEVIWAAPLPPGTSAQRAELIALTQALKMAEGKKLTVYTDSRYAFATTHVHGEIYRRRGWLTSEGKEIKNKNEILALLEALFLPKRLSIIHCPGHQKGDSPQAKGNRLADDTAKKAATETHSSLTVLPAGKRTADGSEFEKRTADGSEFESPKKKAKVE

SEQ ID NO: 7503 - protein, 2176 aa, synthetic construct
MPAAKRVKLDGGDKKYSIGLDIGTNSVGWAVITDEYKVPSKKFKVLGNTDRHSIKKNLIGALLFDSGETAEATRLKRTARRRYTRRKNRICYLQEIFSNEMAKVDDSFFHRLEESFLVEEDKKHERHPIFGNIVDEVAYHEKYPTIYHLRKKLVDSTDKADLRLIYLALAHMIKFRGHFLIEGDLNPDNSDVDKLFIQLVQTYNQLFEENPINASGVDAKAILSARLSKSRRLENLIAQLPGEKKNGLFGNLIALSLGLTPNFKSNFDLAEDAKLQLSKDTYDDDLDNLLAQIGDQYADLFLAAKNLSDAILLSDILRVNTEITKAPLSASMIKRYDEHHQDLTLLKALVRQQLPEKYKEIFFDQSKNGYAGYIDGGASQEEFYKFIKPILEKMDGTEELLVKLNREDLLRKQRTFDNGSIPHQIHLGELHAILRRQEDFYPFLKDNREKIEKILTFRIPYYVGPLARGNSRFAWMTRKSEETITPWNFEEVVDKGASAQSFIERMTNFDKNLPNEKVLPKHSLLYEYFTVYNELTKVKYVTEGMRKPAFLSGEQKKAIVDLLFKTNRKVTVKQLKEDYFKKIECFDSVEISGVEDRFNASLGTYHDLLKIIKDKDFLDNEENEDILEDIVLTLTLFEDREMIEERLKTYAHLFDDKVMKQLKRRRYTGWGRLSRKLINGIRDKQSGKTILDFLKSDGFANRNFMQLIHDDSLTFKEDIQKAQVSGQGDSLHEHIANLAGSPAIKKGILQTVKVVDELVKVMGRHKPENIVIEMARENQTTQKGQKNSRERMKRIEEGIKELGSQILKEHPVENTQLQNEKLYLYYLQNGRDMYVDQELDINRLSDYDVDHIVPQSFLKDDSIDNKVLTRSDKARGKSDNVPSEEVVKKMKNYWRQLLNAKLITQRKFDNLTKAERGGLSELDKAGFIKRQLVETRQITKHVAQILDSRMNTKYDENDKLIREVKVITLKSKLVSDFRKDFQFYKVREINNYHHAHDAYLNAVVGTALIKKYPKLESEFVYGDYKVYDVRKMIAKSEQEIGKATAKYFFYSNIMNFFKTEITLANGEIRKRPLIETNGETGEIVWDKGRDFATVRKVLSMPQVNIVKKTEVQTGGFSKESILPKRNSDKLIARKKDWDPKKYGGFDSPTVAYSVLVVAKVEKGKSKKLKSVKELLGITIMERSSFEKNPIDFLEAKGYKEVKKDLIIKLPKYSLFELENGRKRMLASAGELQKGNELALPSKYVNFLYLASHYEKLKGSPEDNEQKQLFVEQHKHYLDEIIEQISEFSKRVILADANLDKVLSAYNKHRDKPIREQAENIIHLFTLTNLGAPAAFKYFDTTIDRKRYTSTKEVLDATLIHQSITGLYETRIDLSQLGGDGGEAAAKPAPGGGGGMNPLQLLQPLPAEIKGTKLLAHWNSGATITCIPESFLEDEQPIKKTLIKTIHGEKQQNVYYVTFKVKGRKVEAEVIASPYEYILLSPTDVPWLTQQPLQLTILVPLQEYQEKILSKTALPEDQKQQLKTLFVKYDNLWQHWENQVGHRKIRPHNIATGDYPPRPQKQYPINPKAKPSIQIVIDDLLKQGVLTPQNSTMNTPVYPVPKPDGRWRMVLDYREVNKTIPLTAAQNQHSAGILATIVRQKYKTTLDLANGFWAHPITPESYWLTAFTWQGKQYCWTRLPQGFLNSPALFNADVVDLLKEIPNVQVYVDDIYLSHDDPKEHVQQLEKVFQILLQAGYVVSLKKSEIGQKTVEFLGFNITKEGRGLTDTFKTKLLNITPPKDLKQLQSILGLLNFARNFIPNFAELVQPLYNLIAPAKGKYIEWSEENTKQLNMVIEALNTASNLEERLPEQRLVIKVNTSPSAGYVRYYNETGKKPIMYLNYVFSKAELKFSMLEKLLTTMHKALIKAMDLAMGQEILVYSPIVSMTKIQKTPLPERKALPIRWITWMTYLEDPRIQFHYDKTLPELKHIPDVYTSSQSPVKHPSQYEGVFYTDGSAIKSPDPTKSNNAGMGIVHATYKPEYQVLNQWSIPLGNHTAQMAEIAAVEFACKKALKIPGPVLVITDSFYVAESANKELPYWKSNGFVNNKKKPLKHISKWKSIAECLSMKPDITIQHEKGISLQIPVFILKGNALADKLATQGSYVVNAGKRTADGSEFEKRTADGSEFESPKKKAKVE

SEQ ID NO: 7504 - protein, 2094 aa, synthetic construct
MPAAKRVKLDGGDKKYSIGLDIGTNSVGWAVITDEYKVPSKKFKVLGNTDRHSIKKNLIGALLFDSGETAEATRLKRTARRRYTRRKNRICYLQEIFSNEMAKVDDSFFHRLEESFLVEEDKKHERHPIFGNIVDEVAYHEKYPTIYHLRKKLVDSTDKADLRLIYLALAHMIKFRGHFLIEGDLNPDNSDVDKLFIQLVQTYNQLFEENPINASGVDAKAILSARLSKSRRLENLIAQLPGEKKNGLFGNLIALSLGLTPNFKSNFDLAEDAKLQLSKDTYDDDLDNLLAQIGDQYADLFLAAKNLSDAILLSDILRVNTEITKAPLSASMIKRYDEHHQDLTLLKALVRQQLPEKYKEIFFDQSKNGYAGYIDGGASQEEFYKFIKPILEKMDGTEELLVKLNREDLLRKQRTFDNGSIPHQIHLGELHAILRRQEDFYPFLKDNREKIEKILTFRIPYYVGPLARGNSRFAWMTRKSEETITPWNFEEVVDKGASAQSFIERMTNFDKNLPNEKVLPKHSLLYEYFTVYNELTKVKYVTEGMRKPAFLSGEQKKAIVDLLFKTNRKVTVKQLKEDYFKKIECFDSVEISGVEDRFNASLGTYHDLLKIIKDKDFLDNEENEDILEDIVLTLTLFEDREMIEERLKTYAHLFDDKVMKQLKRRRYTGWGRLSRKLINGIRDKQSGKTILDFLKSDGFANRNFMQLIHDDSLTFKEDIQKAQVSGQGDSLHEHIANLAGSPAIKKGILQTVKVVDELVKVMGRHKPENIVIEMARENQTTQKGQKNSRERMKRIEEGIKELGSQILKEHPVENTQLQNEKLYLYYLQNGRDMYVDQELDINRLSDYDVDHIVPQSFLKDDSIDNKVLTRSDKARGKSDNVPSEEVVKKMKNYWRQLLNAKLITQRKFDNLTKAERGGLSELDKAGFIKRQLVETRQITKHVAQILDSRMNTKYDENDKLIREVKVITLKSKLVSDFRKDFQFYKVREINNYHHAHDAYLNAVVGTALIKKYPKLESEFVYGDYKVYDVRKMIAKSEQEIGKATAKYFFYSNIMNFFKTEITLANGEIRKRPLIETNGETGEIVWDKGRDFATVRKVLSMPQVNIVKKTEVQTGGFSKESILPKRNSDKLIARKKDWDPKKYGGFDSPTVAYSVLVVAKVEKGKSKKLKSVKELLGITIMERSSFEKNPIDFLEAKGYKEVKKDLIIKLPKYSLFELENGRKRMLASAGELQKGNELALPSKYVNFLYLASHYEKLKGSPEDNEQKQLFVEQHKHYLDEIIEQISEFSKRVILADANLDKVLSAYNKHRDKPIREQAENIIHLFTLTNLGAPAAFKYFDTTIDRKRYTSTKEVLDATLIHQSITGLYETRIDLSQLGGDGGEAAAKPAPGGGGGVLNLEEEYRLHEKPVPSSIDPSWLQLFPTVWAERAGMGLANQVPPVVVELRSGASPVAVRQYPMSKEAREGIRPHIQKFLDLGVLVPCRSPWNTPLLPVKKPGTNDYRPVQDLREINKRVQDIHPTVPNPYNLLSSLPPSYTWYSVLDLKDAFFCLRLHPNSQPLFAFEWKDPEKGNTGQLTWTRLPQGFKNSPTLFNEALHRDLAPFRALNPQVVLLQYVDDLLVAAPTYEDCKKGTQKLLQELSKLGYRVSAKKAQLCQREVTYLGYLLKEGKRWLTPARKATVMKIPVPTTPRQVREFLGKAGFCRLFIPGFASLAAPLYPLTKPSIPFIWTEEHQQAFDHIKKALLSAPALALPDLTKPFTLYIDERAGVARGVLTQTLGPWRRPVAYLSKKLDPVASGWPTCLKAVAAVALLLKDADKLTLGQNVTVIASHSLESIVRQPPDRWMTNARMTHYQSLLLNERVSFAPPAVLNPATLLPVESEATPVHRCSEILAEETGTRRDLEDQPLPGVPTWYTDGSSFITEGKRRAGAPIVDGKRTVWASSLPEGTSAQKAELVALTQALRLAEGKNINIYTDSRYAFATAHIHGAIYKQRGWLTSAGKDIKNKEEILALLEAIHLPRRVAIIHCPGHQRGSNPVATGNRRADEAAKQAALSTRVLAGTTKPAGKRTADGSEFEKRTADGSEFESPKKKAKVE

SEQ ID NO: 7505 - protein, 2218 aa, synthetic construct
MPAAKRVKLDGGDKKYSIGLDIGTNSVGWAVITDEYKVPSKKFKVLGNTDRHSIKKNLIGALLFDSGETAEATRLKRTARRRYTRRKNRICYLQEIFSNEMAKVDDSFFHRLEESFLVEEDKKHERHPIFGNIVDEVAYHEKYPTIYHLRKKLVDSTDKADLRLIYLALAHMIKFRGHFLIEGDLNPDNSDVDKLFIQLVQTYNQLFEENPINASGVDAKAILSARLSKSRRLENLIAQLPGEKKNGLFGNLIALSLGLTPNFKSNFDLAEDAKLQLSKDTYDDDLDNLLAQIGDQYADLFLAAKNLSDAILLSDILRVNTEITKAPLSASMIKRYDEHHQDLTLLKALVRQQLPEKYKEIFFDQSKNGYAGYIDGGASQEEFYKFIKPILEKMDGTEELLVKLNREDLLRKQRTFDNGSIPHQIHLGELHAILRRQEDFYPFLKDNREKIEKILTFRIPYYVGPLARGNSRFAWMTRKSEETITPWNFEEVVDKGASAQSFIERMTNFDKNLPNEKVLPKHSLLYEYFTVYNELTKVKYVTEGMRKPAFLSGEQKKAIVDLLFKTNRKVTVKQLKEDYFKKIECFDSVEISGVEDRFNASLGTYHDLLKIIKDKDFLDNEENEDILEDIVLTLTLFEDREMIEERLKTYAHLFDDKVMKQLKRRRYTGWGRLSRKLINGIRDKQSGKTILDFLKSDGFANRNFMQLIHDDSLTFKEDIQKAQVSGQGDSLHEHIANLAGSPAIKKGILQTVKVVDELVKVMGRHKPENIVIEMARENQTTQKGQKNSRERMKRIEEGIKELGSQILKEHPVENTQLQNEKLYLYYLQNGRDMYVDQELDINRLSDYDVDHIVPQSFLKDDSIDNKVLTRSDKARGKSDNVPSEEVVKKMKNYWRQLLNAKLITQRKFDNLTKAERGGLSELDKAGFIKRQLVETRQITKHVAQILDSRMNTKYDENDKLIREVKVITLKSKLVSDFRKDFQFYKVREINNYHHAHDAYLNAVVGTALIKKYPKLESEFVYGDYKVYDVRKMIAKSEQEIGKATAKYFFYSNIMNFFKTEITLANGEIRKRPLIETNGETGEIVWDKGRDFATVRKVLSMPQVNIVKKTEVQTGGFSKESILPKRNSDKLIARKKDWDPKKYGGFDSPTVAYSVLVVAKVEKGKSKKLKSVKELLGITIMERSSFEKNPIDFLEAKGYKEVKKDLIIKLPKYSLFELENGRKRMLASAGELQKGNELALPSKYVNFLYLASHYEKLKGSPEDNEQKQLFVEQHKHYLDEIIEQISEFSKRVILADANLDKVLSAYNKHRDKPIREQAENIIHLFTLTNLGAPAAFKYFDTTIDRKRYTSTKEVLDATLIHQSITGLYETRIDLSQLGGDGGEAAAKPAPGGGGGTLGDQGSRGSDPLPEPRVTLTVEGIPTEFLVNTGAEHSVLTKPMGKMGSKRTVVAGATGSKVYPWTTKRLLKIGQKQVTHSFLVIPECPAPLLGRDLLTKLKAQIQFSTEGPQVTWEDRPAMCLVLNLEEEYRLHEKPVPPSIDPSWLQLFPMVWAEKAGMGLANQVPPVVVELKSDASPVAVRQYPMSKEAREGIRPHIQRFLDLGILVPCQSPWNTPLLPVKKPGTNDYRPVQDLREVNKRVQDIHPTVPNPYNLLSSLPPSHTWYSVLDLKDAFFCLKLHPNSQPLFAFEWRDPEKGNTGQLTWTRLPQGFKNSPTLFNEALHRDLASFRALNPQVVMLQYVDDLLVAAPTYRDCKEGTRRLLQELSKLGYRVSAKKAQLCREEVTYLGYLLKGGKRWLTPARKATVMKIPTPTTPRQVREFLGKAGFCRLFIPGFASLAAPLYPLTRPKVPFTWTEAHQEAFGRIKEALLSAPALALPDLTKPFALYVDEKEGVARGVLTQTLGPWRRPVAYLSKKLDPVASGWPTCLKAIAAVALLLKDADKLTLGQNVLVIAPHNLESIVRQPPDRWMTNARMTHYQSLLLNERVSFAPPAILNPATLLPVESDDTPIHICSEILAEETGTRPDLRDQPLPGVPAWYTDGSSFIMDGRRQAGAAIVDNKRTVWASNLPEGTSAQKAELIALTQALRLAEGKSINIYTDSRYAFATAHVHGAIYKQRGWLTSAGKDIKNKEEILALLEAIHLPKRVAIIHCPGHQRGTDPVATGNRKADEAAKQAAQSTRILTETTKNAGKRTADGSEFEKRTADGSEFESPKKKAKVE

SEQ ID NO: 7506 - protein, 2096 aa, synthetic construct
MPAAKRVKLDGGDKKYSIGLDIGTNSVGWAVITDEYKVPSKKFKVLGNTDRHSIKKNLIGALLFDSGETAEATRLKRTARRRYTRRKNRICYLQEIFSNEMAKVDDSFFHRLEESFLVEEDKKHERHPIFGNIVDEVAYHEKYPTIYHLRKKLVDSTDKADLRLIYLALAHMIKFRGHFLIEGDLNPDNSDVDKLFIQLVQTYNQLFEENPINASGVDAKAILSARLSKSRRLENLIAQLPGEKKNGLFGNLIALSLGLTPNFKSNFDLAEDAKLQLSKDTYDDDLDNLLAQIGDQYADLFLAAKNLSDAILLSDILRVNTEITKAPLSASMIKRYDEHHQDLTLLKALVRQQLPEKYKEIFFDQSKNGYAGYIDGGASQEEFYKFIKPILEKMDGTEELLVKLNREDLLRKQRTFDNGSIPHQIHLGELHAILRRQEDFYPFLKDNREKIEKILTFRIPYYVGPLARGNSRFAWMTRKSEETITPWNFEEVVDKGASAQSFIERMTNFDKNLPNEKVLPKHSLLYEYFTVYNELTKVKYVTEGMRKPAFLSGEQKKAIVDLLFKTNRKVTVKQLKEDYFKKIECFDSVEISGVEDRFNASLGTYHDLLKIIKDKDFLDNEENEDILEDIVLTLTLFEDREMIEERLKTYAHLFDDKVMKQLKRRRYTGWGRLSRKLINGIRDKQSGKTILDFLKSDGFANRNFMQLIHDDSLTFKEDIQKAQVSGQGDSLHEHIANLAGSPAIKKGILQTVKVVDELVKVMGRHKPENIVIEMARENQTTQKGQKNSRERMKRIEEGIKELGSQILKEHPVENTQLQNEKLYLYYLQNGRDMYVDQELDINRLSDYDVDHIVPQSFLKDDSIDNKVLTRSDKARGKSDNVPSEEVVKKMKNYWRQLLNAKLITQRKFDNLTKAERGGLSELDKAGFIKRQLVETRQITKHVAQILDSRMNTKYDENDKLIREVKVITLKSKLVSDFRKDFQFYKVREINNYHHAHDAYLNAVVGTALIKKYPKLESEFVYGDYKVYDVRKMIAKSEQEIGKATAKYFFYSNIMNFFKTEITLANGEIRKRPLIETNGETGEIVWDKGRDFATVRKVLSMPQVNIVKKTEVQTGGFSKESILPKRNSDKLIARKKDWDPKKYGGFDSPTVAYSVLVVAKVEKGKSKKLKSVKELLGITIMERSSFEKNPIDFLEAKGYKEVKKDLIIKLPKYSLFELENGRKRMLASAGELQKGNELALPSKYVNFLYLASHYEKLKGSPEDNEQKQLFVEQHKHYLDEIIEQISEFSKRVILADANLDKVLSAYNKHRDKPIREQAENIIHLFTLTNLGAPAAFKYFDTTIDRKRYTSTKEVLDATLIHQSITGLYETRIDLSQLGGDGGEAAAKPAPGGGGGTLNLEDEYRLYETSAEPEVSPGSTWLSDFPQAWAETGGMGLAVRQAPLIIPLKATSTPVSIKQYPMSQEAKLGIKPHIQRLLDQGILVPCQSPWNTPLLPVKKPGTNDYRPVQDLREVNKRVEDIHPTVPNPYNLLSGLPPSHRWYTVLDLKDAFFCLRLHPTSQPLFAFEWRDPGMGISGQLTWTRLPQGFKNSPTLFDEALHRDLADFRIQHPDLILLQYVDDILLAATSELDCQQGTRALLLTLGNLGYRASAKKAQLCQKQVKYLGYLLKEGQRWLTEARKETVMGQPTPKTPRQLREFLGTAGFCRLWIPGFAEMAAPLYPLTKTGTLFNWGPDQQKAYQEIKQALLTAPALGLPDLTKPFELFVDEKQGYAKGVLTQKLGPWRRPVAYLSKKLDPVAAGWPPCLRMVAAIAVLRKDAGKLTMGQPLVILAPHAVEALVKQPPDRWLSNARMTHYQAMLLDTDRVQFGPVVALNPATLLPLPEEGAPHDCLEILAETHGTRPDLTDQPIPDADHTWYTDGSSFLQEGQRKAGAAVTTETEVIWARALPAGTSAQRAELIALTQALKMAEGKRLNVYTDSRYAFATAHIHGEIYRRRGLLTSEGREIKNKSEILALLKALFLPKRLSIIHCLGHQKGDSAEARGNRLADQAAREAAIKTPPDTSTLLAGKRTADGSEFEKRTADGSEFESPKKKAKVE

SEQ ID NO: 7507 - protein, 2096 aa, synthetic construct
MPAAKRVKLDGGDKKYSIGLDIGTNSVGWAVITDEYKVPSKKFKVLGNTDRHSIKKNLIGALLFDSGETAEATRLKRTARRRYTRRKNRICYLQEIFSNEMAKVDDSFFHRLEESFLVEEDKKHERHPIFGNIVDEVAYHEKYPTIYHLRKKLVDSTDKADLRLIYLALAHMIKFRGHFLIEGDLNPDNSDVDKLFIQLVQTYNQLFEENPINASGVDAKAILSARLSKSRRLENLIAQLPGEKKNGLFGNLIALSLGLTPNFKSNFDLAEDAKLQLSKDTYDDDLDNLLAQIGDQYADLFLAAKNLSDAILLSDILRVNTEITKAPLSASMIKRYDEHHQDLTLLKALVRQQLPEKYKEIFFDQSKNGYAGYIDGGASQEEFYKFIKPILEKMDGTEELLVKLNREDLLRKQRTFDNGSIPHQIHLGELHAILRRQEDFYPFLKDNREKIEKILTFRIPYYVGPLARGNSRFAWMTRKSEETITPWNFEEVVDKGASAQSFIERMTNFDKNLPNEKVLPKHSLLYEYFTVYNELTKVKYVTEGMRKPAFLSGEQKKAIVDLLFKTNRKVTVKQLKEDYFKKIECFDSVEISGVEDRFNASLGTYHDLLKIIKDKDFLDNEENEDILEDIVLTLTLFEDREMIEERLKTYAHLFDDKVMKQLKRRRYTGWGRLSRKLINGIRDKQSGKTILDFLKSDGFANRNFMQLIHDDSLTFKEDIQKAQVSGQGDSLHEHIANLAGSPAIKKGILQTVKVVDELVKVMGRHKPENIVIEMARENQTTQKGQKNSRERMKRIEEGIKELGSQILKEHPVENTQLQNEKLYLYYLQNGRDMYVDQELDINRLSDYDVDHIVPQSFLKDDSIDNKVLTRSDKARGKSDNVPSEEVVKKMKNYWRQLLNAKLITQRKFDNLTKAERGGLSELDKAGFIKRQLVETRQITKHVAQILDSRMNTKYDENDKLIREVKVITLKSKLVSDFRKDFQFYKVREINNYHHAHDAYLNAVVGTALIKKYPKLESEFVYGDYKVYDVRKMIAKSEQEIGKATAKYFFYSNIMNFFKTEITLANGEIRKRPLIETNGETGEIVWDKGRDFATVRKVLSMPQVNIVKKTEVQTGGFSKESILPKRNSDKLIARKKDWDPKKYGGFDSPTVAYSVLVVAKVEKGKSKKLKSVKELLGITIMERSSFEKNPIDFLEAKGYKEVKKDLIIKLPKYSLFELENGRKRMLASAGELQKGNELALPSKYVNFLYLASHYEKLKGSPEDNEQKQLFVEQHKHYLDEIIEQISEFSKRVILADANLDKVLSAYNKHRDKPIREQAENIIHLFTLTNLGAPAAFKYFDTTIDRKRYTSTKEVLDATLIHQSITGLYETRIDLSQLGGDGGEAAAKPAPGGGGGTLNLEDEYRLYETSAEPEVSPGSTWLSDFPQAWAETGGMGLAVRQAPLIIPLKATSTPVSIKQYPMSQEAKLGIKPHIQRLLDQGILVPCQSPWNTPLLPVKKPGTNDYRPVQDLREVNKRVEDIHPTVPNPYNLLSGLPPSHRWYTVLDLKDAFFCLRLHPTSQPLFAFEWRDPGMGISGQLTWTRLPQGFKNSPTLFNEALHRDLADFRIQHPDLILLQYVDDILLAATSELDCQQGTRALLLTLGNLGYRASAKKAQLCQKQVKYLGYLLKEGQRWLTEARKETVMGQPTPKTPRQLREFLGTAGFCRLWIPGFAEMAAPLYPLTKPGTLFNWGPDQQKAYQEIKQALLTAPALGLPDLTKPFELFVDEKQGYAKGVLTQKLGPWRRPVAYLSKKLDPVAAGWPPCLRMVAAIAVLRKDAGKLTMGQPLVILAPHAVEALVKQPPDRWLSNARMTHYQAMLLDTDRVQFGPVVALNPATLLPLPEEGAPHDCLEILAETHGTRPDLTDQPIPDADHTWYTDGSSFLQEGQRKAGAAVTTETEVIWARALPAGTSAQRAELIALTQALKMAEGKRLNVYTDSRYAFATAHIHGEIYRRRGWLTSEGREIKNKSEILALLKALFLPKRLSIIHCLGHQKGDSAEARGNRLADQAAREAAIKTPPDTSTLLAGKRTADGSEFEKRTADGSEFESPKKKAKVE

SEQ ID NO: 7508 - protein, 2096 aa, synthetic construct
MPAAKRVKLDGGDKKYSIGLDIGTNSVGWAVITDEYKVPSKKFKVLGNTDRHSIKKNLIGALLFDSGETAEATRLKRTARRRYTRRKNRICYLQEIFSNEMAKVDDSFFHRLEESFLVEEDKKHERHPIFGNIVDEVAYHEKYPTIYHLRKKLVDSTDKADLRLIYLALAHMIKFRGHFLIEGDLNPDNSDVDKLFIQLVQTYNQLFEENPINASGVDAKAILSARLSKSRRLENLIAQLPGEKKNGLFGNLIALSLGLTPNFKSNFDLAEDAKLQLSKDTYDDDLDNLLAQIGDQYADLFLAAKNLSDAILLSDILRVNTEITKAPLSASMIKRYDEHHQDLTLLKALVRQQLPEKYKEIFFDQSKNGYAGYIDGGASQEEFYKFIKPILEKMDGTEELLVKLNREDLLRKQRTFDNGSIPHQIHLGELHAILRRQEDFYPFLKDNREKIEKILTFRIPYYVGPLARGNSRFAWMTRKSEETITPWNFEEVVDKGASAQSFIERMTNFDKNLPNEKVLPKHSLLYEYFTVYNELTKVKYVTEGMRKPAFLSGEQKKAIVDLLFKTNRKVTVKQLKEDYFKKIECFDSVEISGVEDRFNASLGTYHDLLKIIKDKDFLDNEENEDILEDIVLTLTLFEDREMIEERLKTYAHLFDDKVMKQLKRRRYTGWGRLSRKLINGIRDKQSGKTILDFLKSDGFANRNFMQLIHDDSLTFKEDIQKAQVSGQGDSLHEHIANLAGSPAIKKGILQTVKVVDELVKVMGRHKPENIVIEMARENQTTQKGQKNSRERMKRIEEGIKELGSQILKEHPVENTQLQNEKLYLYYLQNGRDMYVDQELDINRLSDYDVDHIVPQSFLKDDSIDNKVLTRSDKARGKSDNVPSEEVVKKMKNYWRQLLNAKLITQRKFDNLTKAERGGLSELDKAGFIKRQLVETRQITKHVAQILDSRMNTKYDENDKLIREVKVITLKSKLVSDFRKDFQFYKVREINNYHHAHDAYLNAVVGTALIKKYPKLESEFVYGDYKVYDVRKMIAKSEQEIGKATAKYFFYSNIMNFFKTEITLANGEIRKRPLIETNGETGEIVWDKGRDFATVRKVLSMPQVNIVKKTEVQTGGFSKESILPKRNSDKLIARKKDWDPKKYGGFDSPTVAYSVLVVAKVEKGKSKKLKSVKELLGITIMERSSFEKNPIDFLEAKGYKEVKKDLIIKLPKYSLFELENGRKRMLASAGELQKGNELALPSKYVNFLYLASHYEKLKGSPEDNEQKQLFVEQHKHYLDEIIEQISEFSKRVILADANLDKVLSAYNKHRDKPIREQAENIIHLFTLTNLGAPAAFKYFDTTIDRKRYTSTKEVLDATLIHQSITGLYETRIDLSQLGGDGGEAAAKPAPGGGGGTLGIEDEYRLHETSTEPDVSLGSTWLSDFPQAWAETGGMGLAVRQAPLIIPLKATSTPVSIQQYPMSHEARLGIKPHIQRLLDQGILVPCQSPWNTPLLPVKKPGTNDYRPVQDLREVNKRVEDIHPTVPNPYNLLSGLPPSHQWYTVLDLKDAFFCLRLHPTSQPLFAFEWRDPGMGISGQLTWTRLPQGFKNSPTLFNEALHRDLADFRIQHPDLILLQYVDDILLAATSELDCQQGTRALLQTLGDLGYRASAKKAQICQKQVKYLGYLLREGQRWLTEARKETVMGQPVPKTPRQLREFLGTAGFCRLWIPGFAEMAAPLYPLTKPGTLFSWGPDQQKAYQEIKQALLTAPALGLPDLTKPFELFVDEKQGYAKGVLTQKLGPWRRPVAYLSKKLDPVAAGWPPCLRMVAAIAVLTKDAGKLTMGQPLVILAPHAVEALVKQPPDRWLSNARMTHYQAMLLDTDRVQFGPVVALNPATLLPLPEEGAPHDCLEILAETHGTRPDLTDQPIPDADHTWYTDGSSFLQEGQRKAGAAVTTETEVIWAGALPAGTSAQRAELIALTQALKMAEGKRLNVYTDSRYAFATAHIHGEIYRRRGWLTSEGREIKNKSEILALLKALFLPKRLSIIHCLGHQKGDSAEARGNRLADQAAREAAIKTPPDTSTLLAGKRTADGSEFEKRTADGSEFESPKKKAKVE

SEQ ID NO: 7509 - protein, 2096 aa, synthetic construct; identical to SEQ ID NO: 4536

SEQ ID NO: 7510 - protein, 2096 aa, synthetic construct
MPAAKRVKLDGGDKKYSIGLDIGTNSVGWAVITDEYKVPSKKFKVLGNTDRHSIKKNLIGALLFDSGETAEATRLKRTARRRYTRRKNRICYLQEIFSNEMAKVDDSFFHRLEESFLVEEDKKHERHPIFGNIVDEVAYHEKYPTIYHLRKKLVDSTDKADLRLIYLALAHMIKFRGHFLIEGDLNPDNSDVDKLFIQLVQTYNQLFEENPINASGVDAKAILSARLSKSRRLENLIAQLPGEKKNGLFGNLIALSLGLTPNFKSNFDLAEDAKLQLSKDTYDDDLDNLLAQIGDQYADLFLAAKNLSDAILLSDILRVNTEITKAPLSASMIKRYDEHHQDLTLLKALVRQQLPEKYKEIFFDQSKNGYAGYIDGGASQEEFYKFIKPILEKMDGTEELLVKLNREDLLRKQRTFDNGSIPHQIHLGELHAILRRQEDFYPFLKDNREKIEKILTFRIPYYVGPLARGNSRFAWMTRKSEETITPWNFEEVVDKGASAQSFIERMTNFDKNLPNEKVLPKHSLLYEYFTVYNELTKVKYVTEGMRKPAFLSGEQKKAIVDLLFKTNRKVTVKQLKEDYFKKIECFDSVEISGVEDRFNASLGTYHDLLKIIKDKDFLDNEENEDILEDIVLTLTLFEDREMIEERLKTYAHLFDDKVMKQLKRRRYTGWGRLSRKLINGIRDKQSGKTILDFLKSDGFANRNFMQLIHDDSLTFKEDIQKAQVSGQGDSLHEHIANLAGSPAIKKGILQTVKVVDELVKVMGRHKPENIVIEMARENQTTQKGQKNSRERMKRIEEGIKELGSQILKEHPVENTQLQNEKLYLYYLQNGRDMYVDQELDINRLSDYDVDHIVPQSFLKDDSIDNKVLTRSDKARGKSDNVPSEEVVKKMKNYWRQLLNAKLITQRKFDNLTKAERGGLSELDKAGFIKRQLVETRQITKHVAQILDSRMNTKYDENDKLIREVKVITLKSKLVSDFRKDFQFYKVREINNYHHAHDAYLNAVVGTALIKKYPKLESEFVYGDYKVYDVRKMIAKSEQEIGKATAKYFFYSNIMNFFKTEITLANGEIRKRPLIETNGETGEIVWDKGRDFATVRKVLSMPQVNIVKKTEVQTGGFSKESILPKRNSDKLIARKKDWDPKKYGGFDSPTVAYSVLVVAKVEKGKSKKLKSVKELLGITIMERSSFEKNPIDFLEAKGYKEVKKDLIIKLPKYSLFELENGRKRMLASAGELQKGNELALPSKYVNFLYLASHYEKLKGSPEDNEQKQLFVEQHKHYLDEIIEQISEFSKRVILADANLDKVLSAYNKHRDKPIREQAENIIHLFTLTNLGAPAAFKYFDTTIDRKRYTSTKEVLDATLIHQSITGLYETRIDLSQLGGDGGEAAAKPAPGGGGGTLNIEDEYRLHETSKGPDVPLGSTWLSDFPQAWAETGGMGLAVRQAPLIIPLKATSTPVSIKQYPMSQEARLGIKPHIQRLLDQGILVPCQSPWNTPLLPVKKPGTNDYRPVQDLREVNKRVEDIHPTVPNPYNLLSGLPPSHQWYTVLDLKDAFFCLRLHPTSQSLFAFEWRDPEMGISGQLTWTRLPQGFKNSPTLFNEALHRDLADFRIQHPDLILLQYVDDLLLAATSELDCQQGTRALLQTLGDLGYRASAKKAQICQKQVKYLGYLLKEGQRWLTEARKETVMGQPTPKTPRQLREFLGTAGFCRLWIPGFAEMAAPLYPLTKPGTLFEWGPDQQKAYQEIKQALLTAPALGLPDLTKPFELFVDEKQGYAKGVLTQKLGPWRRPVAYLSKKLDPVAAGWPPCLRMVAAIAVLTKDAGKLTMGQPLVILAPHAVEALVKQPPDRWLSNARMTHYQALLLDTDRVQFGPIVALNPATLLPLPEEGLQHDCLDILAEAHGTRPDLTDQPLPDADHTWYTDGSSFLQEGQRKAGAAVTTETEVVWAKALPAGTSAQRAELIALTQALKMAEGKKLNVYTDSRYAFATAHIHGEIYRRRGWLTSEGKEIKNKDEILALLKALFLPKRLSIIHCPGHQKGNRAEARGNRMADQAAREVATRETPETSTLLAGKRTADGSEFEKRTADGSEFESPKKKAKVE

SEQ ID NO: 7511 - protein, 2096 aa, synthetic construct
MPAAKRVKLDGGDKKYSIGLDIGTNSVGWAVITDEYKVPSKKFKVLGNTDRHSIKKNLIGALLFDSGETAEATRLKRTARRRYTRRKNRICYLQEIFSNEMAKVDDSFFHRLEESFLVEEDKKHERHPIFGNIVDEVAYHEKYPTIYHLRKKLVDSTDKADLRLIYLALAHMIKFRGHFLIEGDLNPDNSDVDKLFIQLVQTYNQLFEENPINASGVDAKAILSARLSKSRRLENLIAQLPGEKKNGLFGNLIALSLGLTPNFKSNFDLAEDAKLQLSKDTYDDDLDNLLAQIGDQYADLFLAAKNLSDAILLSDILRVNTEITKAPLSASMIKRYDEHHQDLTLLKALVRQQLPEKYKEIFFDQSKNGYAGYIDGGASQEEFYKFIKPILEKMDGTEELLVKLNREDLLRKQRTFDNGSIPHQIHLGELHAILRRQEDFYPFLKDNREKIEKILTFRIPYYVGPLARGNSRFAWMTRKSEETITPWNFEEVVDKGASAQSFIERMTNFDKNLPNEKVLPKHSLLYEYFTVYNELTKVKYVTEGMRKPAFLSGEQKKAIVDLLFKTNRKVTVKQLKEDYFKKIECFDSVEISGVEDRFNASLGTYHDLLKIIKDKDFLDNEENEDILEDIVLTLTLFEDREMIEERLKTYAHLFDDKVMKQLKRRRYTGWGRLSRKLINGIRDKQSGKTILDFLKSDGFANRNFMQLIHDDSLTFKEDIQKAQVSGQGDSLHEHIANLAGSPAIKKGILQTVKVVDELVKVMGRHKPENIVIEMARENQTTQKGQKNSRERMKRIEEGIKELGSQILKEHPVENTQLQNEKLYLYYLQNGRDMYVDQELDINRLSDYDVDHIVPQSFLKDDSIDNKVLTRSDKARGKSDNVPSEEVVKKMKNYWRQLLNAKLITQRKFDNLTKAERGGLSELDKAGFIKRQLVETRQITKHVAQILDSRMNTKYDENDKLIREVKVITLKSKLVSDFRKDFQFYKVREINNYHHAHDAYLNAVVGTALIKKYPKLESEFVYGDYKVYDVRKMIAKSEQEIGKATAKYFFYSNIMNFFKTEITLANGEIRKRPLIETNGETGEIVWDKGRDFATVRKVLSMPQVNIVKKTEVQTGGFSKESILPKRNSDKLIARKKDWDPKKYGGFDSPTVAYSVLVVAKVEKGKSKKLKSVKELLGITIMERSSFEKNPIDFLEAKGYKEVKKDLIIKLPKYSLFELENGRKRMLASAGELQKGNELALPSKYVNFLYLASHYEKLKGSPEDNEQKQLFVEQHKHYLDEIIEQISEFSKRVILADANLDKVLSAYNKHRDKPIREQAENIIHLFTLTNLGAPAAFKYFDTTIDRKRYTSTKEVLDATLIHQSITGLYETRIDLSQLGGDGGEAAAKPAPGGGGGTLNIEDEHRLHETSKEPDVSLGSTWLSDFPQAWAETGGMGLAVRQAPLIIPLKATSTPVSIKQYPMSQEARLGIKPHIQRLLDQGILVPCQSPWNTPLLPVKKPGTNDYRPVQDLREVNKRVEDIHPTVPNPYNLLSGLPPSHQWYTVLDLKDAFFCLRLHPTSQPLFAFEWRDPEMGISGQLTWTRLPQGFKNSPTLFDEALHRDLADFRIQHPDLILLQYVDDLLLAATSELDCQQGTRALLQTLGNLGYRASAKKAQICQKQVKYLGYLLKEGQRWLTEARKETVMGQPTPKTPRQLREFLGTAGFCRLWIPGFAEMAAPLYPLTKTGTLFNWGPDQQKAYQEIKQALLTAPALGLPDLTKPFELFVDEKQGYAKGVLTQKLGPWRRPVAYLSKKLDPVAAGWPPCLRMVAAIAVLTKDAGKLTMGQPLVILAPHAVEALVKQPPDRWLSNARMTHYQALLLDTDRVQFGPVVALNPATLLPLPEEGLQHNCLDILAEAHGTRPDLTDQPLPDADHTWYTDGSSLLQEGQRKAGAAVTTETEVIWAKALPAGTSAQRAELIALTQALKMAEGKKLNVYTDSRYAFATAHIHGEIYRRRGLLTSEGKEIKNKDEILALLKALFLPKRLSIIHCPGHQKGHSAEARGNRMADQAARKAAITETPDTSTLLAGKRTADGSEFEKRTADGSEFESPKKKAKVE

SEQ ID NO: 7512 - protein, 2024 aa, synthetic construct
MPAAKRVKLDGGDKKYSIGLDIGTNSVGWAVITDEYKVPSKKFKVLGNTDRHSIKKNLIGALLFDSGETAEATRLKRTARRRYTRRKNRICYLQEIFSNEMAKVDDSFFHRLEESFLVEEDKKHERHPIFGNIVDEVAYHEKYPTIYHLRKKLVDSTDKADLRLIYLALAHMIKFRGHFLIEGDLNPDNSDVDKLFIQLVQTYNQLFEENPINASGVDAKAILSARLSKSRRLENLIAQLPGEKKNGLFGNLIALSLGLTPNFKSNFDLAEDAKLQLSKDTYDDDLDNLLAQIGDQYADLFLAAKNLSDAILLSDILRVNTEITKAPLSASMIKRYDEHHQDLTLLKALVRQQLPEKYKEIFFDQSKNGYAGYIDGGASQEEFYKFIKPILEKMDGTEELLVKLNREDLLRKQRTFDNGSIPHQIHLGELHAILRRQEDFYPFLKDNREKIEKILTFRIPYYVGPLARGNSRFAWMTRKSEETITPWNFEEVVDKGASAQSFIERMTNFDKNLPNEKVLPKHSLLYEYFTVYNELTKVKYVTEGMRKPAFLSGEQKKAIVDLLFKTNRKVTVKQLKEDYFKKIECFDSVEISGVEDRFNASLGTYHDLLKIIKDKDFLDNEENEDILEDIVLTLTLFEDREMIEERLKTYAHLFDDKVMKQLKRRRYTGWGRLSRKLINGIRDKQSGKTILDFLKSDGFANRNFMQLIHDDSLTFKEDIQKAQVSGQGDSLHEHIANLAGSPAIKKGILQTVKVVDELVKVMGRHKPENIVIEMARENQTTQKGQKNSRERMKRIEEGIKELGSQILKEHPVENTQLQNEKLYLYYLQNGRDMYVDQELDINRLSDYDVDHIVPQSFLKDDSIDNKVLTRSDKARGKSDNVPSEEVVKKMKNYWRQLLNAKLITQRKFDNLTKAERGGLSELDKAGFIKRQLVETRQITKHVAQILDSRMNTKYDENDKLIREVKVITLKSKLVSDFRKDFQFYKVREINNYHHAHDAYLNAVVGTALIKKYPKLESEFVYGDYKVYDVRKMIAKSEQEIGKATAKYFFYSNIMNFFKTEITLANGEIRKRPLIETNGETGEIVWDKGRDFATVRKVLSMPQVNIVKKTEVQTGGFSKESILPKRNSDKLIARKKDWDPKKYGGFDSPTVAYSVLVVAKVEKGKSKKLKSVKELLGITIMERSSFEKNPIDFLEAKGYKEVKKDLIIKLPKYSLFELENGRKRMLASAGELQKGNELALPSKYVNFLYLASHYEKLKGSPEDNEQKQLFVEQHKHYLDEIIEQISEFSKRVILADANLDKVLSAYNKHRDKPIREQAENIIHLFTLTNLGAPAAFKYFDTTIDRKRYTSTKEVLDATLIHQSITGLYETRIDLSQLGGDGGEAAAKPAPGGGGGGRDIMKDIKVRLMTDSPDDSQDLMIGAIESNLFADQISWKSDQPVWLNQWPLKQEKLQALQQLVTEQLQLGHLEESNSPWNTPVFVIKKKSGKWRLLQDLRAVNATMHDMGALQPGLPSPVAVPKGWEIIIIDLQDCFFNIKLHPEDCKRFAFSVPSPNFKRPYQRFQWKVLPQGMKNSPTLCQKFVDKAILTVRDKYQDSYIVHYMDDILLAHPSRSIVDEILTSMIQALNKHGLVVSTEKIQKYDNLKYLGTHIQGDSVSYQKLQIRTDKLRTLNDFQKLLGNINWIRPFLKLTTGELKPLFEILNGDSNPISTRKLTPEACKALQLMNERLSTARVKRLDLSQPWSLCILKTEYTPTACLWQDGVVEWIHLPHISPKVITPYDIFCTQLIIKGRHRSKELFSKDPDYIVVPYTKVQFDLLLQEKEDWPISLLGFLGEVHFHLPKDPLLTFTLQTAIIFPHMTSTTPLEKGIVIFTDGSANGRSVTYIQGREPIIKENTQNTAQQAEIVAVITAFEEVSQPFNLYTDSKYVTGLFPEIETATLSPRTKIYTELKHLQRLIHKRQEKFYIGHIRGHTGLPGPLAQGNAYADSLTRILTAGKRTADGSEFEKRTADGSEFESPKKKAKVE

SEQ ID NO: 7513 - protein, 2088 aa, synthetic construct
MPAAKRVKLDGGDKKYSIGLDIGTNSVGWAVITDEYKVPSKKFKVLGNTDRHSIKKNLIGALLFDSGETAEATRLKRTARRRYTRRKNRICYLQEIFSNEMAKVDDSFFHRLEESFLVEEDKKHERHPIFGNIVDEVAYHEKYPTIYHLRKKLVDSTDKADLRLIYLALAHMIKFRGHFLIEGDLNPDNSDVDKLFIQLVQTYNQLFEENPINASGVDAKAILSARLSKSRRLENLIAQLPGEKKNGLFGNLIALSLGLTPNFKSNFDLAEDAKLQLSKDTYDDDLDNLLAQIGDQYADLFLAAKNLSDAILLSDILRVNTEITKAPLSASMIKRYDEHHQDLTLLKALVRQQLPEKYKEIFFDQSKNGYAGYIDGGASQEEFYKFIKPILEKMDGTEELLVKLNREDLLRKQRTFDNGSIPHQIHLGELHAILRRQEDFYPFLKDNREKIEKILTFRIPYYVGPLARGNSRFAWMTRKSEETITPWNFEEVVDKGASAQSFIERMTNFDKNLPNEKVLPKHSLLYEYFTVYNELTKVKYVTEGMRKPAFLSGEQKKAIVDLLFKTNRKVTVKQLKEDYFKKIECFDSVEISGVEDRFNASLGTYHDLLKIIKDKDFLDNEENEDILEDIVLTLTLFEDREMIEERLKTYAHLFDDKVMKQLKRRRYTGWGRLSRKLINGIRDKQSGKTILDFLKSDGFANRNFMQLIHDDSLTFKEDIQKAQVSGQGDSLHEHIANLAGSPAIKKGILQTVKVVDELVKVMGRHKPENIVIEMARENQTTQKGQKNSRERMKRIEEGIKELGSQILKEHPVENTQLQNEKLYLYYLQNGRDMYVDQELDINRLSDYDVDHIVPQSFLKDDSIDNKVLTRSDKARGKSDNVPSEEVVKKMKNYWRQLLNAKLITQRKFDNLTKAERGGLSELDKAGFIKRQLVETRQITKHVAQILDSRMNTKYDENDKLIREVKVITLKSKLVSDFRKDFQFYKVREINNYHHAHDAYLNAVVGTALIKKYPKLESEFVYGDYKVYDVRKMIAKSEQEIGKATAKYFFYSNIMNFFKTEITLANGEIRKRPLIETNGETGEIVWDKGRDFATVRKVLSMPQVNIVKKTEVQTGGFSKESILPKRNSDKLIARKKDWDPKKYGGFDSPTVAYSVLVVAKVEKGKSKKLKSVKELLGITIMERSSFEKNPIDFLEAKGYKEVKKDLIIKLPKYSLFELENGRKRMLASAGELQKGNELALPSKYVNFLYLASHYEKLKGSPEDNEQKQLFVEQHKHYLDEIIEQISEFSKRVILADANLDKVLSAYNKHRDKPIREQAENIIHLFTLTNLGAPAAFKYFDTTIDRKRYTSTKEVLDATLIHQSITGLYETRIDLSQLGGDGGEAAAKPAPGGGGGLDDEYRLYSPLVKPDQNIQFWLEQFPQAWAETAGMGLAKQVPPQVIQLKASATPVSVRQYPLSKEAQEGIRPHVQRLIQQGILVPVQSPWNTPLLPVRKPGTNDYRPVQDLREVNKRVQDIHPTVPNPYNLLCALPPQRSWYTVLDLKDAFFCLRLHPTSQPLFAFEWRDPGTGRTGQLTWTRLPQGFKNSPTIFNEALHRDLANFRIQHPQVTLLQYVDDLLLAGATKQDCLEGTKALLLELSDLGYRASAKKAQICRREVTYLGYSLRDGQRWLTEARKKTVVQIPAPTTAKQVREFLGKAGFCRLFIPGFATLAAPLYPLTKPKGEFSWAPEHQKAFDAIKKALLSAPALALPDVTKPFTLYVDERKGVARGVLTQTLGPWRRPVAYLSKKLDPVASGWPVCLKAIAAVAILVKDADKLTLGQNITVIAPHALENIVRQPPDRWMTNARMTHYQSLLLTERVTFAPPAALNPATLLPEETDEPVTHDCHQLLIEETGVRKDLTDIPLTGEVLTWFTDGSSYVVEGKRMAGAAVVDGTRTIWASSLPEGTSAQKAELMALTQALRLAEGKSINIYTDSRYAFATAHVHGAIYKQRGWLTSAGREIKNKEEILSLLEALHLPKRLAIIHCPGHQKAKDPISRGNQMADRVAKQAAQGVNLLPAGKRTADGSEFEKRTADGSEFESPKKKAKVE

SEQ ID NO: 7514 - protein, 2090 aa, synthetic construct
MPAAKRVKLDGGDKKYSIGLDIGTNSVGWAVITDEYKVPSKKFKVLGNTDRHSIKKNLIGALLFDSGETAEATRLKRTARRRYTRRKNRICYLQEIFSNEMAKVDDSFFHRLEESFLVEEDKKHERHPIFGNIVDEVAYHEKYPTIYHLRKKLVDSTDKADLRLIYLALAHMIKFRGHFLIEGDLNPDNSDVDKLFIQLVQTYNQLFEENPINASGVDAKAILSARLSKSRRLENLIAQLPGEKKNGLFGNLIALSLGLTPNFKSNFDLAEDAKLQLSKDTYDDDLDNLLAQIGDQYADLFLAAKNLSDAILLSDILRVNTEITKAPLSASMIKRYDEHHQDLTLLKALVRQQLPEKYKEIFFDQSKNGYAGYIDGGASQEEFYKFIKPILEKMDGTEELLVKLNREDLLRKQRTFDNGSIPHQIHLGELHAILRRQEDFYPFLKDNREKIEKILTFRIPYYVGPLARGNSRFAWMTRKSEETITPWNFEEVVDKGASAQSFIERMTNFDKNLPNEKVLPKHSLLYEYFTVYNELTKVKYVTEGMRKPAFLSGEQKKAIVDLLFKTNRKVTVKQLKEDYFKKIECFDSVEISGVEDRFNASLGTYHDLLKIIKDKDFLDNEENEDILEDIVLTLTLFEDREMIEERLKTYAHLFDDKVMKQLKRRRYTGWGRLSRKLINGIRDKQSGKTILDFLKSDGFANRNFMQLIHDDSLTFKEDIQKAQVSGQGDSLHEHIANLAGSPAIKKGILQTVKVVDELVKVMGRHKPENIVIEMARENQTTQKGQKNSRERMKRIEEGIKELGSQILKEHPVENTQLQNEKLYLYYLQNGRDMYVDQELDINRLSDYDVDHIVPQSFLKDDSIDNKVLTRSDKARGKSDNVPSEEVVKKMKNYWRQLLNAKLITQRKFDNLTKAERGGLSELDKAGFIKRQLVETRQITKHVAQILDSRMNTKYDENDKLIREVKVITLKSKLVSDFRKDFQFYKVREINNYHHAHDAYLNAVVGTALIKKYPKLESEFVYGDYKVYDVRKMIAKSEQEIGKATAKYFFYSNIMNFFKTEITLANGEIRKRPLIETNGETGEIVWDKGRDFATVRKVLSMPQVNIVKKTEVQTGGFSKESILPKRNSDKLIARKKDWDPKKYGGFDSPTVAYSVLVVAKVEKGKSKKLKSVKELLGITIMERSSFEKNPIDFLEAKGYKEVKKDLIIKLPKYSLFELENGRKRMLASAGELQKGNELALPSKYVNFLYLASHYEKLKGSPEDNEQKQLFVEQHKHYLDEIIEQISEFSKRVILADANLDKVLSAYNKHRDKPIREQAENIIHLFTLTNLGAPAAFKYFDTTIDRKRYTSTKEVLDATLIHQSITGLYETRIDLSQLGGDGGEAAAKPAPGGGGGTLQLDDEYRLYSPLVKPDQNIQFWLEQFPQAWAETAGMGLAKQVPPQVIQLKASATPVSVRQYPLSKEAQEGIRPHVQRLIQQGILVPVQSPWNTPLLPVRKPGTNDYRPVQDLREVNKRVQDIHPTVPNPYNLLCALPPQRSWYTVLDLKDAFFCLRLHPTSQPLFAFEWRDPGTGRTGQLTWTRLPQGFKNSPTIFDEALHRDLANFRIQHPQVTLLQYVDDLLLAGATKQDCLEGTKALLLELSDLGYRASAKKAQICRREVTYLGYSLRDGQRWLTEARKKTVVQIPAPTTAKQVREFLGTAGFCRLWIPGFATLAAPLYPLTKEKGEFSWAPEHQKAFDAIKKALLSAPALALPDVTKPFTLYVDERKGVARGVLTQTLGPWRRPVAYLSKKLDPVASGWPVCLKAIAAVAILVKDADKLTLGQNITVIAPHALENIVRQPPDRWMTNARMTHYQSLLLTERVTFAPPAALNPATLLPEETDEPVTHDCHQLLIEETGVRKDLTDIPLTGEVLTWFTDGSSYVVEGKRMAGAAVVDGTRTIWASSLPEGTSAQKAELMALTQALRLAEGKSINIYTDSRYAFATAHVHGAIYKQRGLLTSAGREIKNKEEILSLLEALHLPKRLAIIHCPGHQKAKDPISRGNQMADRVAKQAAQGVNLLAGKRTADGSEFEKRTADGSEFESPKKKAKVE

SEQ ID NO: 7515 - protein, 2088 aa, synthetic construct; identical to SEQ ID NO: 7513

SEQ ID NO: 7516 - protein, 2176 aa, synthetic construct
MPAAKRVKLDGGDKKYSIGLDIGTNSVGWAVITDEYKVPSKKFKVLGNTDRHSIKKNLIGALLFDSGETAEATRLKRTARRRYTRRKNRICYLQEIFSNEMAKVDDSFFHRLEESFLVEEDKKHERHPIFGNIVDEVAYHEKYPTIYHLRKKLVDSTDKADLRLIYLALAHMIKFRGHFLIEGDLNPDNSDVDKLFIQLVQTYNQLFEENPINASGVDAKAILSARLSKSRRLENLIAQLPGEKKNGLFGNLIALSLGLTPNFKSNFDLAEDAKLQLSKDTYDDDLDNLLAQIGDQYADLFLAAKNLSDAILLSDILRVNTEITKAPLSASMIKRYDEHHQDLTLLKALVRQQLPEKYKEIFFDQSKNGYAGYIDGGASQEEFYKFIKPILEKMDGTEELLVKLNREDLLRKQRTFDNGSIPHQIHLGELHAILRRQEDFYPFLKDNREKIEKILTFRIPYYVGPLARGNSRFAWMTRKSEETITPWNFEEVVDKGASAQSFIERMTNFDKNLPNEKVLPKHSLLYEYFTVYNELTKVKYVTEGMRKPAFLSGEQKKAIVDLLFKTNRKVTVKQLKEDYFKKIECFDSVEISGVEDRFNASLGTYHDLLKIIKDKDFLDNEENEDILEDIVLTLTLFEDREMIEERLKTYAHLFDDKVMKQLKRRRYTGWGRLSRKLINGIRDKQSGKTILDFLKSDGFANRNFMQLIHDDSLTFKEDIQKAQVSGQGDSLHEHIANLAGSPAIKKGILQTVKVVDELVKVMGRHKPENIVIEMARENQTTQKGQKNSRERMKRIEEGIKELGSQILKEHPVENTQLQNEKLYLYYLQNGRDMYVDQELDINRLSDYDVDHIVPQSFLKDDSIDNKVLTRSDKARGKSDNVPSEEVVKKMKNYWRQLLNAKLITQRKFDNLTKAERGGLSELDKAGFIKRQLVETRQITKHVAQILDSRMNTKYDENDKLIREVKVITLKSKLVSDFRKDFQFYKVREINNYHHAHDAYLNAVVGTALIKKYPKLESEFVYGDYKVYDVRKMIAKSEQEIGKATAKYFFYSNIMNFFKTEITLANGEIRKRPLIETNGETGEIVWDKGRDFATVRKVLSMPQVNIVKKTEVQTGGFSKESILPKRNSDKLIARKKDWDPKKYGGFDSPTVAYSVLVVAKVEKGKSKKLKSVKELLGITIMERSSFEKNPIDFLEAKGYKEVKKDLIIKLPKYSLFELENGRKRMLASAGELQKGNELALPSKYVNFLYLASHYEKLKGSPEDNEQKQLFVEQHKHYLDEIIEQISEFSKRVILADANLDKVLSAYNKHRDKPIREQAENIIHLFTLTNLGAPAAFKYFDTTIDRKRYTSTKEVLDATLIHQSITGLYETRIDLSQLGGDGGEAAAKPAPGGGGGMDPLQLLQPLEAEIKGTKLKAHWNSGATITCVPEAFLEDERPIQTMLIKTIHGEKQQDVYYLTFKVQGRKVEAEVLASPYDYILLNPSDVPWLMKKPLQLTVLVPLHEYQERLLQQTALPKEQKELLQKLFLKYDALWQHWENQVGHRRIKPHNIATGTLAPRPQKQYPINPKAKPSIQIVIDDLLKQGVLIQQNSTMNTPVYPVPKPDGKWRMVLDYREVNKTIPLIAAQNQHSAGILSSIYRGKYKTTLDLTNGFWAHPITPESYWLTAFTWQGKQYCWTRLPQGFLNSPALFNADVVDLLKEIPNVQAYVDDIYISHDDPQEHLEQLEKIFSILLNAGYVVSLKKSEIAQREVEFLGFNITKEGRGLTDTFKQKLLNITPPKDLKQLQSILGKLNFARNFIPNYSELVKPLYTIVAPANGKFISWTEDNSNQLQHIISVLNQADNLEERNPETRLIIKVNSSPSAGYIRYYNEGSKRPIMYVNYIFSKAEAKFTQTEKLLTTMHKGLIKAMDLAMGQEILVYSPIVSMTKIQRTPLPERKALPVRWITWMTYLEDPRIQFHYDKSLPELQQIPNVTEDVIAKTKHPSEFAMVFYTDGSAIKHPDVNKSHSAGMGIAQVQFIPEYKIVHQWSIPLGDHTAQLAEIAAVEFACKKALKISGPVLIVTDSFYVAESANKELPYWKSNGFLNNKKKPLRHVSKWKSIAECLQLKPDIIIMHEKGHQQPMTTLHTEGNNLADKLATQGSYVVHAGKRTADGSEFEKRTADGSEFESPKKKAKVE

SEQ ID NO: 7517 - protein, 2176 aa, synthetic construct
MPAAKRVKLDGGDKKYSIGLDIGTNSVGWAVITDEYKVPSKKFKVLGNTDRHSIKKNLIGALLFDSGETAEATRLKRTARRRYTRRKNRICYLQEIFSNEMAKVDDSFFHRLEESFLVEEDKKHERHPIFGNIVDEVAYHEKYPTIYHLRKKLVDSTDKADLRLIYLALAHMIKFRGHFLIEGDLNPDNSDVDKLFIQLVQTYNQLFEENPINASGVDAKAILSARLSKSRRLENLIAQLPGEKKNGLFGNLIALSLGLTPNFKSNFDLAEDAKLQLSKDTYDDDLDNLLAQIGDQYADLFLAAKNLSDAILLSDILRVNTEITKAPLSASMIKRYDEHHQDLTLLKALVRQQLPEKYKEIFFDQSKNGYAGYIDGGASQEEFYKFIKPILEKMDGTEELLVKLNREDLLRKQRTFDNGSIPHQIHLGELHAILRRQEDFYPFLKDNREKIEKILTFRIPYYVGPLARGNSRFAWMTRKSEETITPWNFEEVVDKGASAQSFIERMTNFDKNLPNEKVLPKHSLLYEYFTVYNELTKVKYVTEGMRKPAFLSGEQKKAIVDLLFKTNRKVTVKQLKEDYFKKIECFDSVEISGVEDRFNASLGTYHDLLKIIKDKDFLDNEENEDILEDIVLTLTLFEDREMIEERLKTYAHLFDDKVMKQLKRRRYTGWGRLSRKLINGIRDKQSGKTILDFLKSDGFANRNFMQLIHDDSLTFKEDIQKAQVSGQGDSLHEHIANLAGSPAIKKGILQTVKVVDELVKVMGRHKPENIVIEMARENQTTQKGQKNSRERMKRIEEGIKELGSQILKEHPVENTQLQNEKLYLYYLQNGRDMYVDQELDINRLSDYDVDHIVPQSFLKDDSIDNKVLTRSDKARGKSDNVPSEEVVKKMKNYWRQLLNAKLITQRKFDNLTKAERGGLSELDKAGFIKRQLVETRQITKHVAQILDSRMNTKYDENDKLIREVKVITLKSKLVSDFRKDFQFYKVREINNYHHAHDAYLNAVVGTALIKKYPKLESEFVYGDYKVYDVRKMIAKSEQEIGKATAKYFFYSNIMNFFKTEITLANGEIRKRPLIETNGETGEIVWDKGRDFATVRKVLSMPQVNIVKKTEVQTGGFSKESILPKRNSDKLIARKKDWDPKKYGGFDSPTVAYSVLVVAKVEKGKSKKLKSVKELLGITIMERSSFEKNPIDFLEAKGYKEVKKDLIIKLPKYSLFELENGRKRMLASAGELQKGNELALPSKYVNFLYLASHYEKLKGSPEDNEQKQLFVEQHKHYLDEIIEQISEFSKRVILADANLDKVLSAYNKHRDKPIREQAENIIHLFTLTNLGAPAAFKYFDTTIDRKRYTSTKEVLDATLIHQSITGLYETRIDLSQLGGDGGEAAAKPAPGGGGGMDPLQLLQPLEAEIKGTKLKAHWNSGATITCVPQAFLEEEVPIKNIWIKTIHGEKEQPVYYLTFKIQGRKVEAEVISSPYDYILVSPSDIPWLMKKPLQLTTLVPLQEYEERLLKQTMLTGSYKEKLQSLFLKYDALWQHWENQVGHRRIKPHHIATGTVNPRPQKQYPINPKAKASIQTVINDLLKQGVLIQQNSIMNTPVYPVPKPDGKWRMVLDYREVNKTIPLIAAQNQHSAGILSSIFRGKYKTTLDLSNGFWAHSITPESYWLTAFTWLGQQYCWTRLPQGFLNSPALFTADVVDLLKEVPNVQVYVDDIYISHDDPREHLEQLEKVFSLLLNAGYVVSLKKSEIAQHEVEFLGFNITKEGRGLTETFKQKLLNITPPRDLKQLQSILGLLNFARNFIPNFSELVKPLYNIIATANGKYITWTTDNSQQLQNIISMLNSAENLEERNPEVRLIMKVNTSPSAGYIRFYNEFAKRPIMYLNYVYTKAEVKFTNTEKLLTTIHKGLIKALDLGMGQEILVYSPIVSMTKIQKTPLPERKALPIRWITWMSYLEDPRIQFHYDKTLPELQQVPTVTDDIIAKIKHPSEFSMVFYTDGSAIKHPNVNKSHNAGMGIAQVQFKPEFTVINTWSIPLGDHTAQLAEVAAVEFACKKALKIDGPVLIVTDSFYVAESVNKELPYWQSNGFFNNKKKPLKHVSKWKSIADCIQLKPDIIIIHEKGHQPTASTFHTEGNNLADKLATQGSYVVNAGKRTADGSEFEKRTADGSEFESPKKKAKVE

SEQ ID NO: 7518 - protein, 2087 aa, synthetic construct
MPAAKRVKLDGGDKKYSIGLDIGTNSVGWAVITDEYKVPSKKFKVLGNTDRHSIKKNLIGALLFDSGETAEATRLKRTARRRYTRRKNRICYLQEIFSNEMAKVDDSFFHRLEESFLVEEDKKHERHPIFGNIVDEVAYHEKYPTIYHLRKKLVDSTDKADLRLIYLALAHMIKFRGHFLIEGDLNPDNSDVDKLFIQLVQTYNQLFEENPINASGVDAKAILSARLSKSRRLENLIAQLPGEKKNGLFGNLIALSLGLTPNFKSNFDLAEDAKLQLSKDTYDDDLDNLLAQIGDQYADLFLAAKNLSDAILLSDILRVNTEITKAPLSASMIKRYDEHHQDLTLLKALVRQQLPEKYKEIFFDQSKNGYAGYIDGGASQEEFYKFIKPILEKMDGTEELLVKLNREDLLRKQRTFDNGSIPHQIHLGELHAILRRQEDFYPFLKDNREKIEKILTFRIPYYVGPLARGNSRFAWMTRKSEETITPWNFEEVVDKGASAQSFIERMTNFDKNLPNEKVLPKHSLLYEYFTVYNELTKVKYVTEGMRKPAFLSGEQKKAIVDLLFKTNRKVTVKQLKEDYFKKIECFDSVEISGVEDRFNASLGTYHDLLKIIKDKDFLDNEENEDILEDIVLTLTLFEDREMIEERLKTYAHLFDDKVMKQLKRRRYTGWGRLSRKLINGIRDKQSGKTILDFLKSDGFANRNFMQLIHDDSLTFKEDIQKAQVSGQGDSLHEHIANLAGSPAIKKGILQTVKVVDELVKVMGRHKPENIVIEMARENQTTQKGQKNSRERMKRIEEGIKELGSQILKEHPVENTQLQNEKLYLYYLQNGRDMYVDQELDINRLSDYDVDHIVPQSFLKDDSIDNKVLTRSDKARGKSDNVPSEEVVKKMKNYWRQLLNAKLITQRKFDNLTKAERGGLSELDKAGFIKRQLVETRQITKHVAQILDSRMNTKYDENDKLIREVKVITLKSKLVSDFRKDFQFYKVREINNYHHAHDAYLNAVVGTALIKKYPKLESEFVYGDYKVYDVRKMIAKSEQEIGKATAKYFFYSNIMNFFKTEITLANGEIRKRPLIETNGETGEIVWDKGRDFATVRKVLSMPQVNIVKKTEVQTGGFSKESILPKRNSDKLIARKKDWDPKKYGGFDSPTVAYSVLVVAKVEKGKSKKLKSVKELLGITIMERSSFEKNPIDFLEAKGYKEVKKDLIIKLPKYSLFELENGRKRMLASAGELQKGNELALPSKYVNFLYLASHYEKLKGSPEDNEQKQLFVEQHKHYLDEIIEQISEFSKRVILADANLDKVLSAYNKHRDKPIREQAENIIHLFTLTNLGAPAAFKYFDTTIDRKRYTSTKEVLDATLIHQSITGLYETRIDLSQLGGDGGEAAAKPAPGGGGGIPWLMKKPLQLTTLVPLQEYEERLLKQTMLTGSYKEKLQSLFLKYDALWQHWENQVGHRRIKPHHIATGTVNPRPQKQYPINPKAKASIQTVINDLLKQGVLIQQNSIMNTPVYPVPKPDGKWRMVLDYREVNKTIPLIAAQNQHSAGILSSIFRGKYKTTLDLSNGFWAHSITPESYWLTAFTWLGQQYCWTRLPQGFLNSPALFNADVVDLLKEVPNVQVYVDDIYISHDDPREHLEQLEKVFSLLLNAGYVVSLKKSEIAQHEVEFLGFNITKEGRGLTETFKQKLLNITPPRDLKQLQSILGLLNFARNFIPNFSELVKPLYNIIATAPGKYITWTTDNSQQLQNIISMLNSAENLEERNPEVRLIMKVNTSPSAGYIRFYNEFAKRPIMYLNYVYTKAEVKFTNTEKLLTTIHKGLIKALDLGMGQEILVYSPIVSMTKIQKTPLPERKALPIRWITWMSYLEDPRIQFHYDKTLPELQQVPTVTDDIIAKIKHPSEFSMVFYTDGSAIKHPNVNKSHNAGMGIAQVQFKPEFTVINTWSIPLGDHTAQLAEVAAVEFACKKALKIDGPVLIVTDSFYVAESVNKELPYWQSNGFFNNKKKPLKHVSKWKSIADCIQLKPDIIIIHEKGHQPTASTFHTEGNNLADKLATQGSYVVNAGKRTADGSEFEKRTADGSEFESPKKKAKVE

SEQ ID NO: 7519 - protein, 2176 aa, synthetic construct
MPAAKRVKLDGGDKKYSIGLDIGTNSVGWAVITDEYKVPSKKFKVLGNTDRHSIKKNLIGALLFDSGETAEATRLKRTARRRYTRRKNRICYLQEIFSNEMAKVDDSFFHRLEESFLVEEDKKHERHPIFGNIVDEVAYHEKYPTIYHLRKKLVDSTDKADLRLIYLALAHMIKFRGHFLIEGDLNPDNSDVDKLFIQLVQTYNQLFEENPINASGVDAKAILSARLSKSRRLENLIAQLPGEKKNGLFGNLIALSLGLTPNFKSNFDLAEDAKLQLSKDTYDDDLDNLLAQIGDQYADLFLAAKNLSDAILLSDILRVNTEITKAPLSASMIKRYDEHHQDLTLLKALVRQQLPEKYKEIFFDQSKNGYAGYIDGGASQEEFYKFIKPILEKMDGTEELLVKLNREDLLRKQRTFDNGSIPHQIHLGELHAILRRQEDFYPFLKDNREKIEKILTFRIPYYVGPLARGNSRFAWMTRKSEETITPWNFEEVVDKGASAQSFIERMTNFDKNLPNEKVLPKHSLLYEYFTVYNELTKVKYVTEGMRKPAFLSGEQKKAIVDLLFKTNRKVTVKQLKEDYFKKIECFDSVEISGVEDRFNASLGTYHDLLKIIKDKDFLDNEENEDILEDIVLTLTLFEDREMIEERLKTYAHLFDDKVMKQLKRRRYTGWGRLSRKLINGIRDKQSGKTILDFLKSDGFANRNFMQLIHDDSLTFKEDIQKAQVSGQGDSLHEHIANLAGSPAIKKGILQTVKVVDELVKVMGRHKPENIVIEMARENQTTQKGQKNSRERMKRIEEGIKELGSQILKEHPVENTQLQNEKLYLYYLQNGRDMYVDQELDINRLSDYDVDHIVPQSFLKDDSIDNKVLTRSDKARGKSDNVPSEEVVKKMKNYWRQLLNAKLITQRKFDNLTKAERGGLSELDKAGFIKRQLVETRQITKHVAQILDSRMNTKYDENDKLIREVKVITLKSKLVSDFRKDFQFYKVREINNYHHAHDAYLNAVVGTALIKKYPKLESEFVYGDYKVYDVRKMIAKSEQEIGKATAKYFFYSNIMNFFKTEITLANGEIRKRPLIETNGETGEIVWDKGRDFATVRKVLSMPQVNIVKKTEVQTGGFSKESILPKRNSDKLIARKKDWDPKKYGGFDSPTVAYSVLVVAKVEKGKSKKLKSVKELLGITIMERSSFEKNPIDFLEAKGYKEVKKDLIIKLPKYSLFELENGRKRMLASAGELQKGNELALPSKYVNFLYLASHYEKLKGSPEDNEQKQLFVEQHKHYLDEIIEQISEFSKRVILADANLDKVLSAYNKHRDKPIREQAENIIHLFTLTNLGAPAAFKYFDTTIDRKRYTSTKEVLDATLIHQSITGLYETRIDLSQLGGDGGEAAAKPAPGGGGGMDPLQLLQPLEAEIKGTKLKAHWNSGATITCVPQAFLEEEVPIKNIWIKTIHGEKEQPVYYLTFKIQGRKVEAEVISSPYDYILVSPSDIPWLMKKPLQLTTLVPLQEYEERLLKQTMLTGSYKEKLQSLFLKYDALWQHWENQVGHRRIKPHHIATGTVNPRPQKQYPINPKAKASIQTVINDLLKQGVLIQQNSIMNTPVYPVPKPDGKWRMVLDYREVNKTIPLIAAQNQHSAGILSSIFRGKYKTTLDLSNGFWAHSITPESYWLTAFTWLGQQYCWTRLPQGFLNSPALFNADVVDLLKEVPNVQVYVDDIYISHDDPREHLEQLEKVFSLLLNAGYVVSLKKSEIAQHEVEFLGFNITKEGRGLTETFKQKLLNITPPRDLKQLQSILGLLNFARNFIPNFSELVKPLYNIIATAPGKYITWTTDNSQQLQNIISMLNSAENLEERNPEVRLIMKVNTSPSAGYIRFYNEFAKRPIMYLNYVYTKAEVKFTNTEKLLTTIHKGLIKALDLGMGQEILVYSPIVSMTKIQKTPLPERKALPIRWITWMSYLEDPRIQFHYDKTLPELQQVPTVTDDIIAKIKHPSEFSMVFYTDGSAIKHPNVNKSHNAGMGIAQVQFKPEFTVINTWSIPLGDHTAQLAEVAAVEFACKKALKIDGPVLIVTDSFYVAESVNKELPYWQSNGFFNNKKKPLKHVSKWKSIADCIQLKPDIIIIHEKGHQPTASTFHTEGNNLADKLATQGSYVVNAGKRTADGSEFEKRTADGSEFESPKKKAKVE

SEQ ID NO: 7520 - protein, 2017 aa, synthetic construct
MPAAKRVKLDGGDKKYSIGLDIGTNSVGWAVITDEYKVPSKKFKVLGNTDRHSIKKNLIGALLFDSGETAEATRLKRTARRRYTRRKNRICYLQEIFSNEMAKVDDSFFHRLEESFLVEEDKKHERHPIFGNIVDEVAYHEKYPTIYHLRKKLVDSTDKADLRLIYLALAHMIKFRGHFLIEGDLNPDNSDVDKLFIQLVQTYNQLFEENPINASGVDAKAILSARLSKSRRLENLIAQLPGEKKNGLFGNLIALSLGLTPNFKSNFDLAEDAKLQLSKDTYDDDLDNLLAQIGDQYADLFLAAKNLSDAILLSDILRVNTEITKAPLSASMIKRYDEHHQDLTLLKALVRQQLPEKYKEIFFDQSKNGYAGYIDGGASQEEFYKFIKPILEKMDGTEELLVKLNREDLLRKQRTFDNGSIPHQIHLGELHAILRRQEDFYPFLKDNREKIEKILTFRIPYYVGPLARGNSRFAWMTRKSEETITPWNFEEVVDKGASAQSFIERMTNFDKNLPNEKVLPKHSLLYEYFTVYNELTKVKYVTEGMRKPAFLSGEQKKAIVDLLFKTNRKVTVKQLKEDYFKKIECFDSVEISGVEDRFNASLGTYHDLLKIIKDKDFLDNEENEDILEDIVLTLTLFEDREMIEERLKTYAHLFDDKVMKQLKRRRYTGWGRLSRKLINGIRDKQSGKTILDFLKSDGFANRNFMQLIHDDSLTFKEDIQKAQVSGQGDSLHEHIANLAGSPAIKKGILQTVKVVDELVKVMGRHKPENIVIEMARENQTTQKGQKNSRERMKRIEEGIKELGSQILKEHPVENTQLQNEKLYLYYLQNGRDMYVDQELDINRLSDYDVDHIVPQSFLKDDSIDNKVLTRSDKARGKSDNVPSEEVVKKMKNYWRQLLNAKLITQRKFDNLTKAERGGLSELDKAGFIKRQLVETRQITKHVAQILDSRMNTKYDENDKLIREVKVITLKSKLVSDFRKDFQFYKVREINNYHHAHDAYLNAVVGTALIKKYPKLESEFVYGDYKVYDVRKMIAKSEQEIGKATAKYFFYSNIMNFFKTEITLANGEIRKRPLIETNGETGEIVWDKGRDFATVRKVLSMPQVNIVKKTEVQTGGFSKESILPKRNSDKLIARKKDWDPKKYGGFDSPTVAYSVLVVAKVEKGKSKKLKSVKELLGITIMERSSFEKNPIDFLEAKGYKEVKKDLIIKLPKYSLFELENGRKRMLASAGELQKGNELALPSKYVNFLYLASHYEKLKGSPEDNEQKQLFVEQHKHYLDEIIEQISEFSKRVILADANLDKVLSAYNKHRDKPIREQAENIIHLFTLTNLGAPAAFKYFDTTIDRKRYTSTKEVLDATLIHQSITGLYETRIDLSQLGGDGGEAAAKPAPGGGGGPRSRAIDIPVPHADKISWKITDPVWVDQWPLTYEKTLAAIALVQEQLAAGHIEPTNSPWNTPIFIIKKKSGSWRLLQDLRAVNKVMVPMGALQPGLPSPVAPPLNYHKIVIDLKDCFFTIPLHPEDRPYFAFSVPQINFQSPMPRYQWKVLPQGMANSPTLCQKFVAAAIAPVRSQWPEAYILHYMDDILLACDSAEAAKACYAHIISCLTSYGLKIAPDKVQVSEPFSYLGFELHHQQVFTPRVCLKTDHLKTLNDFQKLLGDIQWLRPYLKLPTSALVPLNNILKPDPNPLSVRALTPEAKQSLALINKAIQNQSVQQISYNLPLVLLLLPTPHTPTAVFWQPNGTDPTKNGSPLLWLHLPASPSKVLLTYPSLLAMLIIKGRYTGRQLFGRDPHSIIIPYTQDQLTWLLQTSDEWAIALSSFTGDIDNHYPSDPVIQFAKLHQFIFPKITKCAPIPQATLVFTDGSSNGIAAYVIDNQPISIKSPYLSAQLVELYAILQVFTVLAHQPFNLYTDSAYIAQSVPLLETVPFIKSSTNATPLFSKLQQLILNRQHPFFIGHLRAHLNLPGPLAEGNALADAATQIFPIISDAGKRTADGSEFEKRTADGSEFESPKKKAKVE

SEQ ID NO: 7521 - protein, 2094 aa, synthetic construct
MPAAKRVKLDGGDKKYSIGLDIGTNSVGWAVITDEYKVPSKKFKVLGNTDRHSIKKNLIGALLFDSGETAEATRLKRTARRRYTRRKNRICYLQEIFSNEMAKVDDSFFHRLEESFLVEEDKKHERHPIFGNIVDEVAYHEKYPTIYHLRKKLVDSTDKADLRLIYLALAHMIKFRGHFLIEGDLNPDNSDVDKLFIQLVQTYNQLFEENPINASGVDAKAILSARLSKSRRLENLIAQLPGEKKNGLFGNLIALSLGLTPNFKSNFDLAEDAKLQLSKDTYDDDLDNLLAQIGDQYADLFLAAKNLSDAILLSDILRVNTEITKAPLSASMIKRYDEHHQDLTLLKALVRQQLPEKYKEIFFDQSKNGYAGYIDGGASQEEFYKFIKPILEKMDGTEELLVKLNREDLLRKQRTFDNGSIPHQIHLGELHAILRRQEDFYPFLKDNREKIEKILTFRIPYYVGPLARGNSRFAWMTRKSEETITPWNFEEVVDKGASAQSFIERMTNFDKNLPNEKVLPKHSLLYEYFTVYNELTKVKYVTEGMRKPAFLSGEQKKAIVDLLFKTNRKVTVKQLKEDYFKKIECFDSVEISGVEDRFNASLGTYHDLLKIIKDKDFLDNEENEDILEDIVLTLTLFEDREMIEERLKTYAHLFDDKVMKQLKRRRYTGWGRLSRKLINGIRDKQSGKTILDFLKSDGFANRNFMQLIHDDSLTFKEDIQKAQVSGQGDSLHEHIANLAGSPAIKKGILQTVKVVDELVKVMGRHKPENIVIEMARENQTTQKGQKNSRERMKRIEEGIKELGSQILKEHPVENTQLQNEKLYLYYLQNGRDMYVDQELDINRLSDYDVDHIVPQSFLKDDSIDNKVLTRSDKARGKSDNVPSEEVVKKMKNYWRQLLNAKLITQRKFDNLTKAERGGLSELDKAGFIKRQLVETRQITKHVAQILDSRMNTKYDENDKLIREVKVITLKSKLVSDFRKDFQFYKVREINNYHHAHDAYLNAVVGTALIKKYPKLESEFVYGDYKVYDVRKMIAKSEQEIGKATAKYFFYSNIMNFFKTEITLANGEIRKRPLIETNGETGEIVWDKGRDFATVRKVLSMPQVNIVKKTEVQTGGFSKESILPKRNSDKLIARKKDWDPKKYGGFDSPTVAYSVLVVAKVEKGKSKKLKSVKELLGITIMERSSFEKNPIDFLEAKGYKEVKKDLIIKLPKYSLFELENGRKRMLASAGELQKGNELALPSKYVNFLYLASHYEKLKGSPEDNEQKQLFVEQHKHYLDEIIEQISEFSKRVILADANLDKVLSAYNKHRDKPIREQAENIIHLFTLTNLGAPAAFKYFDTTIDRKRYTSTKEVLDATLIHQSITGLYETRIDLSQLGGDGGEAAAKPAPGGGGGVLNLEEEYRLHEKPVPSSIDPSWLQLFPTVWAERAGMGLANQVPPVVVELRSGASPVAVRQYPMSKEAREGIRPHIQRFLDLGVLVPCQSPWNTPLLPVKKPGTNDYRPVQDLREINKRVQDIHPTVPNPYNLLSSLPPSHTWYSVLDLKDAFFCLKLHPNSQPLFAFEWRDPEKGNTGQLTWTRLPQGFKNSPTLFNEALHRDLAPFRALNPQVVLLQYVDDLLVAAPTYRDCKEGTQKLLQELSKLGYRVSAKKAQLCQKEVTYLGYLLKEGKRWLTPARKATVMKIPPPTTPRQVREFLGKAGFCRLFIPGFASLAAPLYPLTKPSIPFIWTEEHQKAFDRIKEALLSAPALALPDLTKPFTLYVDERAGVARGVLTQTLGPWRRPVAYLSKKLDPVASGWPTCLKAVAAVALLLKDADKLTLGQNVTVIASHSLESIVRQPPDRWMTNARMTHYQSLLLNERVSFAPPAVLNPATLLPVESEATPVHRCSEILAEETGTRRDLKDQPLPGVPAWYTDGSSFIAEGKRRAGAAIVDGKRTVWASSLPEGTSAQKAELVALTQALRLAEGKDINIYTDSRYAFATAHIHGAIYKQRGWLTSAGKDIKNKEEILALLEAIHLPKRVAIIHCPGHQKGNDPVATGNRRADEAAKQAALSTRVLAETTKPAGKRTADGSEFEKRTADGSEFESPKKKAKVE

SEQ ID NO: 7522 - protein, 2096 aa, synthetic construct
MPAAKRVKLDGGDKKYSIGLDIGTNSVGWAVITDEYKVPSKKFKVLGNTDRHSIKKNLIGALLFDSGETAEATRLKRTARRRYTRRKNRICYLQEIFSNEMAKVDDSFFHRLEESFLVEEDKKHERHPIFGNIVDEVAYHEKYPTIYHLRKKLVDSTDKADLRLIYLALAHMIKFRGHFLIEGDLNPDNSDVDKLFIQLVQTYNQLFEENPINASGVDAKAILSARLSKSRRLENLIAQLPGEKKNGLFGNLIALSLGLTPNFKSNFDLAEDAKLQLSKDTYDDDLDNLLAQIGDQYADLFLAAKNLSDAILLSDILRVNTEITKAPLSASMIKRYDEHHQDLTLLKALVRQQLPEKYKEIFFDQSKNGYAGYIDGGASQEEFYKFIKPILEKMDGTEELLVKLNREDLLRKQRTFDNGSIPHQIHLGELHAILRRQEDFYPFLKDNREKIEKILTFRIPYYVGPLARGNSRFAWMTRKSEETITPWNFEEVVDKGASAQSFIERMTNFDKNLPNEKVLPKHSLLYEYFTVYNELTKVKYVTEGMRKPAFLSGEQKKAIVDLLFKTNRKVTVKQLKEDYFKKIECFDSVEISGVEDRFNASLGTYHDLLKIIKDKDFLDNEENEDILEDIVLTLTLFEDREMIEERLKTYAHLFDDKVMKQLKRRRYTGWGRLSRKLINGIRDKQSGKTILDFLKSDGFANRNFMQLIHDDSLTFKEDIQKAQVSGQGDSLHEHIANLAGSPAIKKGILQTVKVVDELVKVMGRHKPENIVIEMARENQTTQKGQKNSRERMKRIEEGIKELGSQILKEHPVENTQLQNEKLYLYYLQNGRDMYVDQELDINRLSDYDVDHIVPQSFLKDDSIDNKVLTRSDKARGKSDNVPSEEVVKKMKNYWRQLLNAKLITQRKFDNLTKAERGGLSELDKAGFIKRQLVETRQITKHVAQILDSRMNTKYDENDKLIREVKVITLKSKLVSDFRKDFQFYKVREINNYHHAHDAYLNAVVGTALIKKYPKLESEFVYGDYKVYDVRKMIAKSEQEIGKATAKYFFYSNIMNFFKTEITLANGEIRKRPLIETNGETGEIVWDKGRDFATVRKVLSMPQVNIVKKTEVQTGGFSKESILPKRNSDKLIARKKDWDPKKYGGFDSPTVAYSVLVVAKVEKGKSKKLKSVKELLGITIMERSSFEKNPIDFLEAKGYKEVKKDLIIKLPKYSLFELENGRKRMLASAGELQKGNELALPSKYVNFLYLASHYEKLKGSPEDNEQKQLFVEQHKHYLDEIIEQISEFSKRVILADANLDKVLSAYNKHRDKPIREQAENIIHLFTLTNLGAPAAFKYFDTTIDRKRYTSTKEVLDATLIHQSITGLYETRIDLSQLGGDGGEAAAKPAPGGGGGTLNIEDEYRLHETSKEPDVPLGSTWLSDFPQAWAETGGMGLAVRQAPLIIPLKATSTPVSIKQYPMSQEARLGIKPHIQRLLDQGILVPCQSPWNTPLLPVKKPGTNDYRPVQDLREVNKRVEDIHPTVPNPYNLLSGLPPSHQWYTVLDLKDAFFCLRLHPTSQPLFAFEWRDPEMGISGQLTWTRLPQGFKNSPTLFNEALHRDLADFRIQHPDLILLQYVDDLLLAATSEQDCQRGTRALLQTLGNLGYRASAKKAQICQKQVKYLGYLLKEGQRWLTEARKETVMGQPTPKTPRQLREFLGTAGFCRLWIPGFAEMAAPLYPLTKPGTLFNWGPDQQKAYQEIKQALLTAPALGLPDLTKPFELFVDEKQGYAKGVLTQKLGPWRRPVAYLSKKLDPVAAGWPPCLRMVAAIAVLTKDAGKLTMGQPLVILAPHAVEALVKQPPDRWLSNARMTHYQAMLLDTDRVQFGPVVALNPATLLPLPEKEAPHDCLEILAETHGTRPDLTDQPIPDADYTWYTDGSSFLQEGQRRAGAAVTTETEVIWARALPAGTSAQRAELIALTQALKMAEGKKLNVYTDSRYAFATAHVHGEIYRRRGWLTSEGREIKNKNEILALLKALFLPKRLSIIHCPGHQKGNSAEARGNRMADQAAREAAMKAVLETSTLLAGKRTADGSEFEKRTADGSEFESPKKKAKVE

SEQ ID NO: 7523 - protein, 2096 aa, synthetic construct
MPAAKRVKLDGGDKKYSIGLDIGTNSVGWAVITDEYKVPSKKFKVLGNTDRHSIKKNLIGALLFDSGETAEATRLKRTARRRYTRRKNRICYLQEIFSNEMAKVDDSFFHRLEESFLVEEDKKHERHPIFGNIVDEVAYHEKYPTIYHLRKKLVDSTDKADLRLIYLALAHMIKFRGHFLIEGDLNPDNSDVDKLFIQLVQTYNQLFEENPINASGVDAKAILSARLSKSRRLENLIAQLPGEKKNGLFGNLIALSLGLTPNFKSNFDLAEDAKLQLSKDTYDDDLDNLLAQIGDQYADLFLAAKNLSDAILLSDILRVNTEITKAPLSASMIKRYDEHHQDLTLLKALVRQQLPEKYKEIFFDQSKNGYAGYIDGGASQEEFYKFIKPILEKMDGTEELLVKLNREDLLRKQRTFDNGSIPHQIHLGELHAILRRQEDFYPFLKDNREKIEKILTFRIPYYVGPLARGNSRFAWMTRKSEETITPWNFEEVVDKGASAQSFIERMTNFDKNLPNEKVLPKHSLLYEYFTVYNELTKVKYVTEGMRKPAFLSGEQKKAIVDLLFKTNRKVTVKQLKEDYFKKIECFDSVEISGVEDRFNASLGTYHDLLKIIKDKDFLDNEENEDILEDIVLTLTLFEDREMIEERLKTYAHLFDDKVMKQLKRRRYTGWGRLSRKLINGIRDKQSGKTILDFLKSDGFANRNFMQLIHDDSLTFKEDIQKAQVSGQGDSLHEHIANLAGSPAIKKGILQTVKVVDELVKVMGRHKPENIVIEMARENQTTQKGQKNSRERMKRIEEGIKELGSQILKEHPVENTQLQNEKLYLYYLQNGRDMYVDQELDINRLSDYDVDHIVPQSFLKDDSIDNKVLTRSDKARGKSDNVPSEEVVKKMKNYWRQLLNAKLITQRKFDNLTKAERGGLSELDKAGFIKRQLVETRQITKHVAQILDSRMNTKYDENDKLIREVKVITLKSKLVSDFRKDFQFYKVREINNYHHAHDAYLNAVVGTALIKKYPKLESEFVYGDYKVYDVRKMIAKSEQEIGKATAKYFFYSNIMNFFKTEITLANGEIRKRPLIETNGETGEIVWDKGRDFATVRKVLSMPQVNIVKKTEVQTGGFSKESILPKRNSDKLIARKKDWDPKKYGGFDSPTVAYSVLVVAKVEKGKSKKLKSVKELLGITIMERSSFEKNPIDFLEAKGYKEVKKDLIIKLPKYSLFELENGRKRMLASAGELQKGNELALPSKYVNFLYLASHYEKLKGSPEDNEQKQLFVEQHKHYLDEIIEQISEFSKRVILADANLDKVLSAYNKHRDKPIREQAENIIHLFTLTNLGAPAAFKYFDTTIDRKRYTSTKEVLDATLIHQSITGLYETRIDLSQLGGDGGEAAAKPAPGGGGGTLNIEDEYRLHETSKEPDVPLGSTWLSDFPQAWAETGGMGLAVRQAPLIIPLKATSTPVSIKQYPMSQEARLGIKPHIQRLLDQGILVPCQSPWNTPLLPVKKPGTNDYRPVQDLREVNKRVEDIHPTVPNPYNLLSGLPPSHQWYTVLDLKDAFFCLRLHPTSQPLFAFEWRDPEMGISGQLTWTRLPQGFKNSPTLFNEALHRDLADFRIQHPDLILLQYVDDLLLAATSEQDCQRGTRALLQTLGNLGYRASAKKAQICQKQVKYLGYLLKEGQRWLTEARKETVMGQPTPKTPRQLREFLGKAGFCRLFIPGFAEMAAPLYPLTKPGTLFNWGPDQQKAYQEIKQALLTAPALGLPDLTKPFELFVDEKQGYAKGVLTQKLGPWRRPVAYLSKKLDPVAAGWPPCLRMVAAIAVLTKDAGKLTMGQPLVILAPHAVEALVKQPPDRWLSNARMTHYQAMLLDTDRVQFGPVVALNPATLLPLPEKEAPHDCLEILAETHGTRPDLTDQPIPDADYTWYTDGSSFLQEGQRRAGAAVTTETEVIWARALPAGTSAQRAELIALTQALKMAEGKKLNVYTDSRYAFATAHVHGEIYRRRGWLTSEGREIKNKNEILALLKALFLPKRLSIIHCPGHQKGNSAEARGNRMADQAAREAAMKAVLETSTLLAGKRTADGSEFEKRTADGSEFESPKKKAKVE

SEQ ID NO: 7524 - protein, 2098 aa, synthetic construct
MPAAKRVKLDGGDKKYSIGLDIGTNSVGWAVITDEYKVPSKKFKVLGNTDRHSIKKNLIGALLFDSGETAEATRLKRTARRRYTRRKNRICYLQEIFSNEMAKVDDSFFHRLEESFLVEEDKKHERHPIFGNIVDEVAYHEKYPTIYHLRKKLVDSTDKADLRLIYLALAHMIKFRGHFLIEGDLNPDNSDVDKLFIQLVQTYNQLFEENPINASGVDAKAILSARLSKSRRLENLIAQLPGEKKNGLFGNLIALSLGLTPNFKSNFDLAEDAKLQLSKDTYDDDLDNLLAQIGDQYADLFLAAKNLSDAILLSDILRVNTEITKAPLSASMIKRYDEHHQDLTLLKALVRQQLPEKYKEIFFDQSKNGYAGYIDGGASQEEFYKFIKPILEKMDGTEELLVKLNREDLLRKQRTFDNGSIPHQIHLGELHAILRRQEDFYPFLKDNREKIEKILTFRIPYYVGPLARGNSRFAWMTRKSEETITPWNFEEVVDKGASAQSFIERMTNFDKNLPNEKVLPKHSLLYEYFTVYNELTKVKYVTEGMRKPAFLSGEQKKAIVDLLFKTNRKVTVKQLKEDYFKKIECFDSVEISGVEDRFNASLGTYHDLLKIIKDKDFLDNEENEDILEDIVLTLTLFEDREMIEERLKTYAHLFDDKVMKQLKRRRYTGWGRLSRKLINGIRDKQSGKTILDFLKSDGFANRNFMQLIHDDSLTFKEDIQKAQVSGQGDSLHEHIANLAGSPAIKKGILQTVKVVDELVKVMGRHKPENIVIEMARENQTTQKGQKNSRERMKRIEEGIKELGSQILKEHPVENTQLQNEKLYLYYLQNGRDMYVDQELDINRLSDYDVDHIVPQSFLKDDSIDNKVLTRSDKARGKSDNVPSEEVVKKMKNYWRQLLNAKLITQRKFDNLTKAERGGLSELDKAGFIKRQLVETRQITKHVAQILDSRMNTKYDENDKLIREVKVITLKSKLVSDFRKDFQFYKVREINNYHHAHDAYLNAVVGTALIKKYPKLESEFVYGDYKVYDVRKMIAKSEQEIGKATAKYFFYSNIMNFFKTEITLANGEIRKRPLIETNGETGEIVWDKGRDFATVRKVLSMPQVNIVKKTEVQTGGFSKESILPKRNSDKLIARKKDWDPKKYGGFDSPTVAYSVLVVAKVEKGKSKKLKSVKELLGITIMERSSFEKNPIDFLEAKGYKEVKKDLIIKLPKYSLFELENGRKRMLASAGELQKGNELALPSKYVNFLYLASHYEKLKGSPEDNEQKQLFVEQHKHYLDEIIEQISEFSKRVILADANLDKVLSAYNKHRDKPIREQAENIIHLFTLTNLGAPAAFKYFDTTIDRKRYTSTKEVLDATLIHQSITGLYETRIDLSQLGGDGGPAPGGGEAAAKGGTAPLEEEYRLFLEAPIQNVTLLEQWKREIPKVWAEINPPGLASTQAPIHVQLLSTALPVRVRQYPITLEAKRSLRETIRKFRAAGILRPVHSPWNTPLLPVRKSGTSEYRMVQDLREVNKRVETIHPTVPNPYTLLSLLPPDRIWYSVLDLKDAFFCIPLAPESQLIFAFEWADAEEGESGQLTWTRLPQGFKNSPTLFDEALNRDLQGFRLDHPSVSLLQYVDDLLIAADTQAACLSATRDLLMTLAELGYRVSGKKAQLCQEEVTYLGFKIHKGSRSLSNSRTQAILQIPVPKTKRQVREFLGTIGYCRLWIPGFAELAQPLYAATRGGNDPLVWGEKEEEAFQSLKLALTQPPALALPSLDKPFQLFVEETSGAAKGVLTQALGPWKRPVAYLSKRLDPVAAGWPRCLRAIAAAALLTREASKLTFGQDIEITSSHNLESLLRSPPDKWLTNARITQYQVLLLDPPRVRFKQTAALNPATLLPETDDTLPIHHCLDTLDSLTSTRPDLTDQPLAQAEATLFTDGSSYIRDGKRYAGAAVVTLDSVIWAEPLPIGTSAQKAELIALTKALEWSKDKSVNIYTDSRYAFATLHVHGMIYRERGLLTAGGKAIKNAPEILALLTAVWLPKRVAVMHCKGHQKDDAPTSTGNRRADEVAREVAIRPLSTQATISAGKRTADGSEFEKRTADGSEFESPKKKAKVE

SEQ ID NO: 7525 - protein, 2098 aa, synthetic construct
MPAAKRVKLDGGDKKYSIGLDIGTNSVGWAVITDEYKVPSKKFKVLGNTDRHSIKKNLIGALLFDSGETAEATRLKRTARRRYTRRKNRICYLQEIFSNEMAKVDDSFFHRLEESFLVEEDKKHERHPIFGNIVDEVAYHEKYPTIYHLRKKLVDSTDKADLRLIYLALAHMIKFRGHFLIEGDLNPDNSDVDKLFIQLVQTYNQLFEENPINASGVDAKAILSARLSKSRRLENLIAQLPGEKKNGLFGNLIALSLGLTPNFKSNFDLAEDAKLQLSKDTYDDDLDNLLAQIGDQYADLFLAAKNLSDAILLSDILRVNTEITKAPLSASMIKRYDEHHQDLTLLKALVRQQLPEKYKEIFFDQSKNGYAGYIDGGASQEEFYKFIKPILEKMDGTEELLVKLNREDLLRKQRTFDNGSIPHQIHLGELHAILRRQEDFYPFLKDNREKIEKILTFRIPYYVGPLARGNSRFAWMTRKSEETITPWNFEEVVDKGASAQSFIERMTNFDKNLPNEKVLPKHSLLYEYFTVYNELTKVKYVTEGMRKPAFLSGEQKKAIVDLLFKTNRKVTVKQLKEDYFKKIECFDSVEISGVEDRFNASLGTYHDLLKIIKDKDFLDNEENEDILEDIVLTLTLFEDREMIEERLKTYAHLFDDKVMKQLKRRRYTGWGRLSRKLINGIRDKQSGKTILDFLKSDGFANRNFMQLIHDDSLTFKEDIQKAQVSGQGDSLHEHIANLAGSPAIKKGILQTVKVVDELVKVMGRHKPENIVIEMARENQTTQKGQKNSRERMKRIEEGIKELGSQILKEHPVENTQLQNEKLYLYYLQNGRDMYVDQELDINRLSDYDVDHIVPQSFLKDDSIDNKVLTRSDKARGKSDNVPSEEVVKKMKNYWRQLLNAKLITQRKFDNLTKAERGGLSELDKAGFIKRQLVETRQITKHVAQILDSRMNTKYDENDKLIREVKVITLKSKLVSDFRKDFQFYKVREINNYHHAHDAYLNAVVGTALIKKYPKLESEFVYGDYKVYDVRKMIAKSEQEIGKATAKYFFYSNIMNFFKTEITLANGEIRKRPLIETNGETGEIVWDKGRDFATVRKVLSMPQVNIVKKTEVQTGGFSKESILPKRNSDKLIARKKDWDPKKYGGFDSPTVAYSVLVVAKVEKGKSKKLKSVKELLGITIMERSSFEKNPIDFLEAKGYKEVKKDLIIKLPKYSLFELENGRKRMLASAGELQKGNELALPSKYVNFLYLASHYEKLKGSPEDNEQKQLFVEQHKHYLDEIIEQISEFSKRVILADANLDKVLSAYNKHRDKPIREQAENIIHLFTLTNLGAPAAFKYFDTTIDRKRYTSTKEVLDATLIHQSITGLYETRIDLSQLGGDGGPAPGGGEAAAKGGTAPLEEEYRLFLEAPIQNVTLLEQWKREIPKVWAEINPPGLASTQAPIHVQLLSTALPVRVRQYPITLEAKRSLRETIRKFRAAGILRPVHSPWNTPLLPVRKSGTSEYRMVQDLREVNKRVETIHPTVPNPYTLLSLLPPDRIWYSVLDLKDAFFCIPLAPESQLIFAFEWADAEEGESGQLTWTRLPQGFKNSPTLFNEALNRDLQGFRLDHPSVSLLQYVDDLLIAADTQAACLSATRDLLMTLAELGYRVSGKKAQLCQEEVTYLGFKIHKGSRSLSNSRTQAILQIPVPKTKRQVREFLGTIGYCRLWIPGFAELAQPLYAATRPGNDPLVWGEKEEEAFQSLKLALTQPPALALPSLDKPFQLFVEETSGAAKGVLTQALGPWKRPVAYLSKRLDPVAAGWPRCLRAIAAAALLTREASKLTFGQDIEITSSHNLESLLRSPPDKWLTNARITQYQVLLLDPPRVRFKQTAALNPATLLPETDDTLPIHHCLDTLDSLTSTRPDLTDQPLAQAEATLFTDGSSYIRDGKRYAGAAVVTLDSVIWAEPLPIGTSAQKAELIALTKALEWSKDKSVNIYTDSRYAFATLHVHGMIYRERGWLTAGGKAIKNAPEILALLTAVWLPKRVAVMHCKGHQKDDAPTSTGNRRADEVAREVAIRPLSTQATISAGKRTADGSEFEKRTADGSEFESPKKKAKVE

SEQ ID NO: 7526 - protein, 2098 aa, synthetic construct
MPAAKRVKLDGGDKKYSIGLDIGTNSVGWAVITDEYKVPSKKFKVLGNTDRHSIKKNLIGALLFDSGETAEATRLKRTARRRYTRRKNRICYLQEIFSNEMAKVDDSFFHRLEESFLVEEDKKHERHPIFGNIVDEVAYHEKYPTIYHLRKKLVDSTDKADLRLIYLALAHMIKFRGHFLIEGDLNPDNSDVDKLFIQLVQTYNQLFEENPINASGVDAKAILSARLSKSRRLENLIAQLPGEKKNGLFGNLIALSLGLTPNFKSNFDLAEDAKLQLSKDTYDDDLDNLLAQIGDQYADLFLAAKNLSDAILLSDILRVNTEITKAPLSASMIKRYDEHHQDLTLLKALVRQQLPEKYKEIFFDQSKNGYAGYIDGGASQEEFYKFIKPILEKMDGTEELLVKLNREDLLRKQRTFDNGSIPHQIHLGELHAILRRQEDFYPFLKDNREKIEKILTFRIPYYVGPLARGNSRFAWMTRKSEETITPWNFEEVVDKGASAQSFIERMTNFDKNLPNEKVLPKHSLLYEYFTVYNELTKVKYVTEGMRKPAFLSGEQKKAIVDLLFKTNRKVTVKQLKEDYFKKIECFDSVEISGVEDRFNASLGTYHDLLKIIKDKDFLDNEENEDILEDIVLTLTLFEDREMIEERLKTYAHLFDDKVMKQLKRRRYTGWGRLSRKLINGIRDKQSGKTILDFLKSDGFANRNFMQLIHDDSLTFKEDIQKAQVSGQGDSLHEHIANLAGSPAIKKGILQTVKVVDELVKVMGRHKPENIVIEMARENQTTQKGQKNSRERMKRIEEGIKELGSQILKEHPVENTQLQNEKLYLYYLQNGRDMYVDQELDINRLSDYDVDHIVPQSFLKDDSIDNKVLTRSDKARGKSDNVPSEEVVKKMKNYWRQLLNAKLITQRKFDNLTKAERGGLSELDKAGFIKRQLVETRQITKHVAQILDSRMNTKYDENDKLIREVKVITLKSKLVSDFRKDFQFYKVREINNYHHAHDAYLNAVVGTALIKKYPKLESEFVYGDYKVYDVRKMIAKSEQEIGKATAKYFFYSNIMNFFKTEITLANGEIRKRPLIETNGETGEIVWDKGRDFATVRKVLSMPQVNIVKKTEVQTGGFSKESILPKRNSDKLIARKKDWDPKKYGGFDSPTVAYSVLVVAKVEKGKSKKLKSVKELLGITIMERSSFEKNPIDFLEAKGYKEVKKDLIIKLPKYSLFELENGRKRMLASAGELQKGNELALPSKYVNFLYLASHYEKLKGSPEDNEQKQLFVEQHKHYLDEIIEQISEFSKRVILADANLDKVLSAYNKHRDKPIREQAENIIHLFTLTNLGAPAAFKYFDTTIDRKRYTSTKEVLDATLIHQSITGLYETRIDLSQLGGDGGPAPGGGEAAAKGGTAPLEEEYRLFLEAPIQNVTLLEQWKREIPKVWAEINPPGLASTQAPIHVQLLSTALPVRVRQYPITLEAKRSLRETIRKFRAAGILRPVHSPWNTPLLPVRKSGTSEYRMVQDLREVNKRVETIHPTVPNPYTLLSLLPPDRIWYSVLDLKDAFFCIPLAPESQLIFAFEWADAEEGESGQLTWTRLPQGFKNSPTLFNEALNRDLQGFRLDHPSVSLLQYVDDLLIAADTQAACLSATRDLLMTLAELGYRVSGKKAQLCQEEVTYLGFKIHKGSRSLSNSRTQAILQIPVPKTKRQVREFLGKIGYCRLFIPGFAELAQPLYAATRPGNDPLVWGEKEEEAFQSLKLALTQPPALALPSLDKPFQLFVEETSGAAKGVLTQALGPWKRPVAYLSKRLDPVAAGWPRCLRAIAAAALLTREASKLTFGQDIEITSSHNLESLLRSPPDKWLTNARITQYQVLLLDPPRVRFKQTAALNPATLLPETDDTLPIHHCLDTLDSLTSTRPDLTDQPLAQAEATLFTDGSSYIRDGKRYAGAAVVTLDSVIWAEPLPIGTSAQKAELIALTKALEWSKDKSVNIYTDSRYAFATLHVHGMIYRERGWLTAGGKAIKNAPEILALLTAVWLPKRVAVMHCKGHQKDDAPTSTGNRRADEVAREVAIRPLSTQATISAGKRTADGSEFEKRTADGSEFESPKKKAKVE

SEQ ID NO: 7527 - protein, 2173 aa, synthetic construct
MPAAKRVKLDGGDKKYSIGLDIGTNSVGWAVITDEYKVPSKKFKVLGNTDRHSIKKNLIGALLFDSGETAEATRLKRTARRRYTRRKNRICYLQEIFSNEMAKVDDSFFHRLEESFLVEEDKKHERHPIFGNIVDEVAYHEKYPTIYHLRKKLVDSTDKADLRLIYLALAHMIKFRGHFLIEGDLNPDNSDVDKLFIQLVQTYNQLFEENPINASGVDAKAILSARLSKSRRLENLIAQLPGEKKNGLFGNLIALSLGLTPNFKSNFDLAEDAKLQLSKDTYDDDLDNLLAQIGDQYADLFLAAKNLSDAILLSDILRVNTEITKAPLSASMIKRYDEHHQDLTLLKALVRQQLPEKYKEIFFDQSKNGYAGYIDGGASQEEFYKFIKPILEKMDGTEELLVKLNREDLLRKQRTFDNGSIPHQIHLGELHAILRRQEDFYPFLKDNREKIEKILTFRIPYYVGPLARGNSRFAWMTRKSEETITPWNFEEVVDKGASAQSFIERMTNFDKNLPNEKVLPKHSLLYEYFTVYNELTKVKYVTEGMRKPAFLSGEQKKAIVDLLFKTNRKVTVKQLKEDYFKKIECFDSVEISGVEDRFNASLGTYHDLLKIIKDKDFLDNEENEDILEDIVLTLTLFEDREMIEERLKTYAHLFDDKVMKQLKRRRYTGWGRLSRKLINGIRDKQSGKTILDFLKSDGFANRNFMQLIHDDSLTFKEDIQKAQVSGQGDSLHEHIANLAGSPAIKKGILQTVKVVDELVKVMGRHKPENIVIEMARENQTTQKGQKNSRERMKRIEEGIKELGSQILKEHPVENTQLQNEKLYLYYLQNGRDMYVDQELDINRLSDYDVDHIVPQSFLKDDSIDNKVLTRSDKARGKSDNVPSEEVVKKMKNYWRQLLNAKLITQRKFDNLTKAERGGLSELDKAGFIKRQLVETRQITKHVAQILDSRMNTKYDENDKLIREVKVITLKSKLVSDFRKDFQFYKVREINNYHHAHDAYLNAVVGTALIKKYPKLESEFVYGDYKVYDVRKMIAKSEQEIGKATAKYFFYSNIMNFFKTEITLANGEIRKRPLIETNGETGEIVWDKGRDFATVRKVLSMPQVNIVKKTEVQTGGFSKESILPKRNSDKLIARKKDWDPKKYGGFDSPTVAYSVLVVAKVEKGKSKKLKSVKELLGITIMERSSFEKNPIDFLEAKGYKEVKKDLIIKLPKYSLFELENGRKRMLASAGELQKGNELALPSKYVNFLYLASHYEKLKGSPEDNEQKQLFVEQHKHYLDEIIEQISEFSKRVILADANLDKVLSAYNKHRDKPIREQAENIIHLFTLTNLGAPAAFKYFDTTIDRKRYTSTKEVLDATLIHQSITGLYETRIDLSQLGGDGGPAPGGGEAAAKGGMDLLKPLTVERKGVKIKGYWNSQADITCVPKDLLQGEEPVRQQNVTTIHGTQEGDVYYVNLKIDGRRINTEVIGTTLDYAIITPGDVPWILKKPLELTIKLDLEEQQGTLLNNSILSKKGKEELKQLFEKYSALWQSWENQVGHRRIRPHKIATGTVKPTPQKQYHINPKAKPDIQIVINDLLKQGVLIQKESTMNTPVYPVPKPNGRWRMVLDYRAVNKVTPLIAVQNQHSYGILGSLFKGRYKTTIDLSNGFWAHPIVPEDYWITAFTWQGKQYCWTVLPQGFLNSPGLFTGDVVDLLQGIPNVEVYVDDVYISHDSEKEHLEYLDILFNRLKEAGYIISLKKSNIANSIVDFLGFQITNEGRGLTDTFKEKLENITAPTTLKQLQSILGLLNFARNFIPDFTELIAPLYALIPKSTKNYVPWQIEHSTTLETLITKLNGAEYLQGRKGDKTLIMKVNASYTTGYIRYYNEGEKKPISYVSIVFSKTELKFTELEKLLTTVHKGLLKALDLSMGQNIHVYSPIVSMQNIQKTPQTAKKALASRWLSWLSYLEDPRIRFFYDPQMPALKDLPAVDTGKDNKKHPSNFQHIFYTDGSAITSPTKEGHLNAGMGIVYFINKDGNLQKQQEWSISLGNHTAQFAEIAAFEFALKKCLPLGGNILVVTDSNYVAKAYNEELDVWASNGFVNNRKKPLKHISKWKSVADLKRLRPDVVVTHEPGHQKLDSSPHAYGNNLADQLATQASFKVHAGKRTADGSEFEKRTADGSEFESPKKKAKVE

SEQ ID NO: 7528 - protein, 2095 aa, synthetic construct
MPAAKRVKLDGGDKKYSIGLDIGTNSVGWAVITDEYKVPSKKFKVLGNTDRHSIKKNLIGALLFDSGETAEATRLKRTARRRYTRRKNRICYLQEIFSNEMAKVDDSFFHRLEESFLVEEDKKHERHPIFGNIVDEVAYHEKYPTIYHLRKKLVDSTDKADLRLIYLALAHMIKFRGHFLIEGDLNPDNSDVDKLFIQLVQTYNQLFEENPINASGVDAKAILSARLSKSRRLENLIAQLPGEKKNGLFGNLIALSLGLTPNFKSNFDLAEDAKLQLSKDTYDDDLDNLLAQIGDQYADLFLAAKNLSDAILLSDILRVNTEITKAPLSASMIKRYDEHHQDLTLLKALVRQQLPEKYKEIFFDQSKNGYAGYIDGGASQEEFYKFIKPILEKMDGTEELLVKLNREDLLRKQRTFDNGSIPHQIHLGELHAILRRQEDFYPFLKDNREKIEKILTFRIPYYVGPLARGNSRFAWMTRKSEETITPWNFEEVVDKGASAQSFIERMTNFDKNLPNEKVLPKHSLLYEYFTVYNELTKVKYVTEGMRKPAFLSGEQKKAIVDLLFKTNRKVTVKQLKEDYFKKIECFDSVEISGVEDRFNASLGTYHDLLKIIKDKDFLDNEENEDILEDIVLTLTLFEDREMIEERLKTYAHLFDDKVMKQLKRRRYTGWGRLSRKLINGIRDKQSGKTILDFLKSDGFANRNFMQLIHDDSLTFKEDIQKAQVSGQGDSLHEHIANLAGSPAIKKGILQTVKVVDELVKVMGRHKPENIVIEMARENQTTQKGQKNSRERMKRIEEGIKELGSQILKEHPVENTQLQNEKLYLYYLQNGRDMYVDQELDINRLSDYDVDHIVPQSFLKDDSIDNKVLTRSDKARGKSDNVPSEEVVKKMKNYWRQLLNAKLITQRKFDNLTKAERGGLSELDKAGFIKRQLVETRQITKHVAQILDSRMNTKYDENDKLIREVKVITLKSKLVSDFRKDFQFYKVREINNYHHAHDAYLNAVVGTALIKKYPKLESEFVYGDYKVYDVRKMIAKSEQEIGKATAKYFFYSNIMNFFKTEITLANGEIRKRPLIETNGETGEIVWDKGRDFATVRKVLSMPQVNIVKKTEVQTGGFSKESILPKRNSDKLIARKKDWDPKKYGGFDSPTVAYSVLVVAKVEKGKSKKLKSVKELLGITIMERSSFEKNPIDFLEAKGYKEVKKDLIIKLPKYSLFELENGRKRMLASAGELQKGNELALPSKYVNFLYLASHYEKLKGSPEDNEQKQLFVEQHKHYLDEIIEQISEFSKRVILADANLDKVLSAYNKHRDKPIREQAENIIHLFTLTNLGAPAAFKYFDTTIDRKRYTSTKEVLDATLIHQSITGLYETRIDLSQLGGDGGPAPGGGEAAAKGGTLQLEEEYRLFEPESTQKQEMDIWLKNFPQAWAETGGMGTAHCQAPVLIQLKATATPISIRQYPMPHEAYQGIKPHIRRMLDQGILKPCQSPWNTPLLPVKKPGTEDYRPVQDLREVNKRVEDIHPTVPNPYNLLSTLPPSHPWYTVLDLKDAFFCLRLHSESQLLFAFEWRDPEIGLSGQLTWTRLPQGFKNSPTLFNEALHSDLADFRVRYPALVLLQYVDDLLLAAATRTECLEGTKALLETLGNKGYRASAKKAQICLQEVTYLGYSLKDGQRWLTKARKEAILSIPVPKNSRQVREFLGTAGYCRLWIPGFAELAAPLYPLTRPGTLFQWGTEQQLAFEDIKKALLSSPALGLPDITKPFELFIDENSGFAKGVLVQKLGPWKRPVAYLSKKLDTVASGWPPCLRMVAAIAILVKDAGKLTLGQPLTILTSHPVEALVRQPPNKWLSNARMTHYQAMLLDAERVHFGPTVSLNPATLLPLPSGGNHHDCLQILAETHGTRPDLTDQPLPDADLTWYTDGSSFIRNGEREAGAAVTTESEVIWAAPLPPGTSAQRAELIALTQALKMAEGKKLTVYTDSRYAFATTHVHGEIYRRRGWLTSEGKEIKNKNEILALLEALFLPKRLSIIHCPGHQKGDSPQAKGNRLADDTAKKAATETHSSLTVLPAGKRTADGSEFEKRTADGSEFESPKKKAKVE

SEQ ID NO: 7529 - protein, 2094 aa, synthetic construct
MPAAKRVKLDGGDKKYSIGLDIGTNSVGWAVITDEYKVPSKKFKVLGNTDRHSIKKNLIGALLFDSGETAEATRLKRTARRRYTRRKNRICYLQEIFSNEMAKVDDSFFHRLEESFLVEEDKKHERHPIFGNIVDEVAYHEKYPTIYHLRKKLVDSTDKADLRLIYLALAHMIKFRGHFLIEGDLNPDNSDVDKLFIQLVQTYNQLFEENPINASGVDAKAILSARLSKSRRLENLIAQLPGEKKNGLFGNLIALSLGLTPNFKSNFDLAEDAKLQLSKDTYDDDLDNLLAQIGDQYADLFLAAKNLSDAILLSDILRVNTEITKAPLSASMIKRYDEHHQDLTLLKALVRQQLPEKYKEIFFDQSKNGYAGYIDGGASQEEFYKFIKPILEKMDGTEELLVKLNREDLLRKQRTFDNGSIPHQIHLGELHAILRRQEDFYPFLKDNREKIEKILTFRIPYYVGPLARGNSRFAWMTRKSEETITPWNFEEVVDKGASAQSFIERMTNFDKNLPNEKVLPKHSLLYEYFTVYNELTKVKYVTEGMRKPAFLSGEQKKAIVDLLFKTNRKVTVKQLKEDYFKKIECFDSVEISGVEDRFNASLGTYHDLLKIIKDKDFLDNEENEDILEDIVLTLTLFEDREMIEERLKTYAHLFDDKVMKQLKRRRYTGWGRLSRKLINGIRDKQSGKTILDFLKSDGFANRNFMQLIHDDSLTFKEDIQKAQVSGQGDSLHEHIANLAGSPAIKKGILQTVKVVDELVKVMGRHKPENIVIEMARENQTTQKGQKNSRERMKRIEEGIKELGSQILKEHPVENTQLQNEKLYLYYLQNGRDMYVDQELDINRLSDYDVDHIVPQSFLKDDSIDNKVLTRSDKARGKSDNVPSEEVVKKMKNYWRQLLNAKLITQRKFDNLTKAERGGLSELDKAGFIKRQLVETRQITKHVAQILDSRMNTKYDENDKLIREVKVITLKSKLVSDFRKDFQFYKVREINNYHHAHDAYLNAVVGTALIKKYPKLESEFVYGDYKVYDVRKMIAKSEQEIGKATAKYFFYSNIMNFFKTEITLANGEIRKRPLIETNGETGEIVWDKGRDFATVRKVLSMPQVNIVKKTEVQTGGFSKESILPKRNSDKLIARKKDWDPKKYGGFDSPTVAYSVLVVAKVEKGKSKKLKSVKELLGITIMERSSFEKNPIDFLEAKGYKEVKKDLIIKLPKYSLFELENGRKRMLASAGELQKGNELALPSKYVNFLYLASHYEKLKGSPEDNEQKQLFVEQHKHYLDEIIEQISEFSKRVILADANLDKVLSAYNKHRDKPIREQAENIIHLFTLTNLGAPAAFKYFDTTIDRKRYTSTKEVLDATLIHQSITGLYETRIDLSQLGGDGGPAPGGGEAAAKGGVLNLEEEYRLHEKPVPSSIDPSWLQLFPTVWAERAGMGLANQVPPVVVELRSGASPVAVRQYPMSKEAREGIRPHIQKFLDLGVLVPCRSPWNTPLLPVKKPGTNDYRPVQDLREINKRVQDIHPTVPNPYNLLSSLPPSYTWYSVLDLKDAFFCLRLHPNSQPLFAFEWKDPEKGNTGQLTWTRLPQGFKNSPTLFNEALHRDLAPFRALNPQVVLLQYVDDLLVAAPTYEDCKKGTQKLLQELSKLGYRVSAKKAQLCQREVTYLGYLLKEGKRWLTPARKATVMKIPVPTTPRQVREFLGTAGFCRLWIPGFASLAAPLYPLTKPSIPFIWTEEHQQAFDHIKKALLSAPALALPDLTKPFTLYIDERAGVARGVLTQTLGPWRRPVAYLSKKLDPVASGWPTCLKAVAAVALLLKDADKLTLGQNVTVIASHSLESIVRQPPDRWMTNARMTHYQSLLLNERVSFAPPAVLNPATLLPVESEATPVHRCSEILAEETGTRRDLEDQPLPGVPTWYTDGSSFITEGKRRAGAPIVDGKRTVWASSLPEGTSAQKAELVALTQALRLAEGKNINIYTDSRYAFATAHIHGAIYKQRGWLTSAGKDIKNKEEILALLEAIHLPRRVAIIHCPGHQRGSNPVATGNRRADEAAKQAALSTRVLAGTTKPAGKRTADGSEFEKRTADGSEFESPKKKAKVE

SEQ ID NO: 7530 - protein, 2127 aa, synthetic construct
MPAAKRVKLDGGDKKYSIGLDIGTNSVGWAVITDEYKVPSKKFKVLGNTDRHSIKKNLIGALLFDSGETAEATRLKRTARRRYTRRKNRICYLQEIFSNEMAKVDDSFFHRLEESFLVEEDKKHERHPIFGNIVDEVAYHEKYPTIYHLRKKLVDSTDKADLRLIYLALAHMIKFRGHFLIEGDLNPDNSDVDKLFIQLVQTYNQLFEENPINASGVDAKAILSARLSKSRRLENLIAQLPGEKKNGLFGNLIALSLGLTPNFKSNFDLAEDAKLQLSKDTYDDDLDNLLAQIGDQYADLFLAAKNLSDAILLSDILRVNTEITKAPLSASMIKRYDEHHQDLTLLKALVRQQLPEKYKEIFFDQSKNGYAGYIDGGASQEEFYKFIKPILEKMDGTEELLVKLNREDLLRKQRTFDNGSIPHQIHLGELHAILRRQEDFYPFLKDNREKIEKILTFRIPYYVGPLARGNSRFAWMTRKSEETITPWNFEEVVDKGASAQSFIERMTNFDKNLPNEKVLPKHSLLYEYFTVYNELTKVKYVTEGMRKPAFLSGEQKKAIVDLLFKTNRKVTVKQLKEDYFKKIECFDSVEISGVEDRFNASLGTYHDLLKIIKDKDFLDNEENEDILEDIVLTLTLFEDREMIEERLKTYAHLFDDKVMKQLKRRRYTGWGRLSRKLINGIRDKQSGKTILDFLKSDGFANRNFMQLIHDDSLTFKEDIQKAQVSGQGDSLHEHIANLAGSPAIKKGILQTVKVVDELVKVMGRHKPENIVIEMARENQTTQKGQKNSRERMKRIEEGIKELGSQILKEHPVENTQLQNEKLYLYYLQNGRDMYVDQELDINRLSDYDVDHIVPQSFLKDDSIDNKVLTRSDKARGKSDNVPSEEVVKKMKNYWRQLLNAKLITQRKFDNLTKAERGGLSELDKAGFIKRQLVETRQITKHVAQILDSRMNTKYDENDKLIREVKVITLKSKLVSDFRKDFQFYKVREINNYHHAHDAYLNAVVGTALIKKYPKLESEFVYGDYKVYDVRKMIAKSEQEIGKATAKYFFYSNIMNFFKTEITLANGEIRKRPLIETNGETGEIVWDKGRDFATVRKVLSMPQVNIVKKTEVQTGGFSKESILPKRNSDKLIARKKDWDPKKYGGFDSPTVAYSVLVVAKVEKGKSKKLKSVKELLGITIMERSSFEKNPIDFLEAKGYKEVKKDLIIKLPKYSLFELENGRKRMLASAGELQKGNELALPSKYVNFLYLASHYEKLKGSPEDNEQKQLFVEQHKHYLDEIIEQISEFSKRVILADANLDKVLSAYNKHRDKPIREQAENIIHLFTLTNLGAPAAFKYFDTTIDRKRYTSTKEVLDATLIHQSITGLYETRIDLSQLGGDGGPAPGGGEAAAKGGLLGRDLLTKLKAQIQFSTEGPQVTWEDRPAMCLVLNLEEEYRLHEKPVPPSIDPSWLQLFPMVWAEKAGMGLANQVPPVVVELKSDASPVAVRQYPMSKEAREGIRPHIQRFLDLGILVPCQSPWNTPLLPVKKPGTNDYRPVQDLREVNKRVQDIHPTVPNPYNLLSSLPPSHTWYSVLDLKDAFFCLKLHPNSQPLFAFEWRDPEKGNTGQLTWTRLPQGFKNSPTLFNEALHRDLASFRALNPQVVMLQYVDDLLVAAPTYRDCKEGTRRLLQELSKLGYRVSAKKAQLCREEVTYLGYLLKGGKRWLTPARKATVMKIPTPTTPRQVREFLGTAGFCRLWIPGFASLAAPLYPLTRPKVPFTWTEAHQEAFGRIKEALLSAPALALPDLTKPFALYVDEKEGVARGVLTQTLGPWRRPVAYLSKKLDPVASGWPTCLKAIAAVALLLKDADKLTLGQNVLVIAPHNLESIVRQPPDRWMTNARMTHYQSLLLNERVSFAPPAILNPATLLPVESDDTPIHICSEILAEETGTRPDLRDQPLPGVPAWYTDGSSFIMDGRRQAGAAIVDNKRTVWASNLPEGTSAQKAELIALTQALRLAEGKSINIYTDSRYAFATAHVHGAIYKQRGWLTSAGKDIKNKEEILALLEAIHLPKRVAIIHCPGHQRGTDPVATGNRKADEAAKQAAQSTRILTETTKNAGKRTADGSEFEKRTADGSEFESPKKKAKVE

SEQ ID NO: 7531 - protein, 2127 aa, synthetic construct
MPAAKRVKLDGGDKKYSIGLDIGTNSVGWAVITDEYKVPSKKFKVLGNTDRHSIKKNLIGALLFDSGETAEATRLKRTARRRYTRRKNRICYLQEIFSNEMAKVDDSFFHRLEESFLVEEDKKHERHPIFGNIVDEVAYHEKYPTIYHLRKKLVDSTDKADLRLIYLALAHMIKFRGHFLIEGDLNPDNSDVDKLFIQLVQTYNQLFEENPINASGVDAKAILSARLSKSRRLENLIAQLPGEKKNGLFGNLIALSLGLTPNFKSNFDLAEDAKLQLSKDTYDDDLDNLLAQIGDQYADLFLAAKNLSDAILLSDILRVNTEITKAPLSASMIKRYDEHHQDLTLLKALVRQQLPEKYKEIFFDQSKNGYAGYIDGGASQEEFYKFIKPILEKMDGTEELLVKLNREDLLRKQRTFDNGSIPHQIHLGELHAILRRQEDFYPFLKDNREKIEKILTFRIPYYVGPLARGNSRFAWMTRKSEETITPWNFEEVVDKGASAQSFIERMTNFDKNLPNEKVLPKHSLLYEYFTVYNELTKVKYVTEGMRKPAFLSGEQKKAIVDLLFKTNRKVTVKQLKEDYFKKIECFDSVEISGVEDRFNASLGTYHDLLKIIKDKDFLDNEENEDILEDIVLTLTLFEDREMIEERLKTYAHLFDDKVMKQLKRRRYTGWGRLSRKLINGIRDKQSGKTILDFLKSDGFANRNFMQLIHDDSLTFKEDIQKAQVSGQGDSLHEHIANLAGSPAIKKGILQTVKVVDELVKVMGRHKPENIVIEMARENQTTQKGQKNSRERMKRIEEGIKELGSQILKEHPVENTQLQNEKLYLYYLQNGRDMYVDQELDINRLSDYDVDHIVPQSFLKDDSIDNKVLTRSDKARGKSDNVPSEEVVKKMKNYWRQLLNAKLITQRKFDNLTKAERGGLSELDKAGFIKRQLVETRQITKHVAQILDSRMNTKYDENDKLIREVKVITLKSKLVSDFRKDFQFYKVREINNYHHAHDAYLNAVVGTALIKKYPKLESEFVYGDYKVYDVRKMIAKSEQEIGKATAKYFFYSNIMNFFKTEITLANGEIRKRPLIETNGETGEIVWDKGRDFATVRKVLSMPQVNIVKKTEVQTGGFSKESILPKRNSDKLIARKKDWDPKKYGGFDSPTVAYSVLVVAKVEKGKSKKLKSVKELLGITIMERSSFEKNPIDFLEAKGYKEVKKDLIIKLPKYSLFELENGRKRMLASAGELQKGNELALPSKYVNFLYLASHYEKLKGSPEDNEQKQLFVEQHKHYLDEIIEQISEFSKRVILADANLDKVLSAYNKHRDKPIREQAENIIHLFTLTNLGAPAAFKYFDTTIDRKRYTSTKEVLDATLIHQSITGLYETRIDLSQLGGDGGPAPGGGEAAAKGGLLGRDLLTKLKAQIQFSTEGPQVTWEDRPAMCLVLNLEEEYRLHEKPVPPSIDPSWLQLFPMVWAEKAGMGLANQVPPVVVELKSDASPVAVRQYPMSKEAREGIRPHIQRFLDLGILVPCQSPWNTPLLPVKKPGTNDYRPVQDLREVNKRVQDIHPTVPNPYNLLSSLPPSHTWYSVLDLKDAFFCLKLHPNSQPLFAFEWRDPEKGNTGQLTWTRLPQGFKNSPTLFNEALHRDLASFRALNPQVVMLQYVDDLLVAAPTYRDCKEGTRRLLQELSKLGYRVSAKKAQLCREEVTYLGYLLKGGKRWLTPARKATVMKIPTPTTPRQVREFLGKAGFCRLFIPGFASLAAPLYPLTRPKVPFTWTEAHQEAFGRIKEALLSAPALALPDLTKPFALYVDEKEGVARGVLTQTLGPWRRPVAYLSKKLDPVASGWPTCLKAIAAVALLLKDADKLTLGQNVLVIAPHNLESIVRQPPDRWMTNARMTHYQSLLLNERVSFAPPAILNPATLLPVESDDTPIHICSEILAEETGTRPDLRDQPLPGVPAWYTDGSSFIMDGRRQAGAAIVDNKRTVWASNLPEGTSAQKAELIALTQALRLAEGKSINIYTDSRYAFATAHVHGAIYKQRGWLTSAGKDIKNKEEILALLEAIHLPKRVAIIHCPGHQRGTDPVATGNRKADEAAKQAAQSTRILTETTKNAGKRTADGSEFEKRTADGSEFESPKKKAKVE

SEQ ID NO: 7532 - protein, 2218 aa, synthetic construct
MPAAKRVKLDGGDKKYSIGLDIGTNSVGWAVITDEYKVPSKKFKVLGNTDRHSIKKNLIGALLFDSGETAEATRLKRTARRRYTRRKNRICYLQEIFSNEMAKVDDSFFHRLEESFLVEEDKKHERHPIFGNIVDEVAYHEKYPTIYHLRKKLVDSTDKADLRLIYLALAHMIKFRGHFLIEGDLNPDNSDVDKLFIQLVQTYNQLFEENPINASGVDAKAILSARLSKSRRLENLIAQLPGEKKNGLFGNLIALSLGLTPNFKSNFDLAEDAKLQLSKDTYDDDLDNLLAQIGDQYADLFLAAKNLSDAILLSDILRVNTEITKAPLSASMIKRYDEHHQDLTLLKALVRQQLPEKYKEIFFDQSKNGYAGYIDGGASQEEFYKFIKPILEKMDGTEELLVKLNREDLLRKQRTFDNGSIPHQIHLGELHAILRRQEDFYPFLKDNREKIEKILTFRIPYYVGPLARGNSRFAWMTRKSEETITPWNFEEVVDKGASAQSFIERMTNFDKNLPNEKVLPKHSLLYEYFTVYNELTKVKYVTEGMRKPAFLSGEQKKAIVDLLFKTNRKVTVKQLKEDYFKKIECFDSVEISGVEDRFNASLGTYHDLLKIIKDKDFLDNEENEDILEDIVLTLTLFEDREMIEERLKTYAHLFDDKVMKQLKRRRYTGWGRLSRKLINGIRDKQSGKTILDFLKSDGFANRNFMQLIHDDSLTFKEDIQKAQVSGQGDSLHEHIANLAGSPAIKKGILQTVKVVDELVKVMGRHKPENIVIEMARENQTTQKGQKNSRERMKRIEEGIKELGSQILKEHPVENTQLQNEKLYLYYLQNGRDMYVDQELDINRLSDYDVDHIVPQSFLKDDSIDNKVLTRSDKARGKSDNVPSEEVVKKMKNYWRQLLNAKLITQRKFDNLTKAERGGLSELDKAGFIKRQLVETRQITKHVAQILDSRMNTKYDENDKLIREVKVITLKSKLVSDFRKDFQFYKVREINNYHHAHDAYLNAVVGTALIKKYPKLESEFVYGDYKVYDVRKMIAKSEQEIGKATAKYFFYSNIMNFFKTEITLANGEIRKRPLIETNGETGEIVWDKGRDFATVRKVLSMPQVNIVKKTEVQTGGFSKESILPKRNSDKLIARKKDWDPKKYGGFDSPTVAYSVLVVAKVEKGKSKKLKSVKELLGITIMERSSFEKNPIDFLEAKGYKEVKKDLIIKLPKYSLFELENGRKRMLASAGELQKGNELALPSKYVNFLYLASHYEKLKGSPEDNEQKQLFVEQHKHYLDEIIEQISEFSKRVILADANLDKVLSAYNKHRDKPIREQAENIIHLFTLTNLGAPAAFKYFDTTIDRKRYTSTKEVLDATLIHQSITGLYETRIDLSQLGGDGGPAPGGGEAAAKGGTLGDQGSRGSDPLPEPRVTLTVEGIPTEFLVNTGAEHSVLTKPMGKMGSKRTVVAGATGSKVYPWTTKRLLKIGQKQVTHSFLVIPECPAPLLGRDLLTKLKAQIQFSTEGPQVTWEDRPAMCLVLNLEEEYRLHEKPVPPSIDPSWLQLFPMVWAEKAGMGLANQVPPVVVELKSDASPVAVRQYPMSKEAREGIRPHIQRFLDLGILVPCQSPWNTPLLPVKKPGTNDYRPVQDLREVNKRVQDIHPTVPNPYNLLSSLPPSHTWYSVLDLKDAFFCLKLHPNSQPLFAFEWRDPEKGNTGQLTWTRLPQGFKNSPTLFNEALHRDLASFRALNPQVVMLQYVDDLLVAAPTYRDCKEGTRRLLQELSKLGYRVSAKKAQLCREEVTYLGYLLKGGKRWLTPARKATVMKIPTPTTPRQVREFLGTAGFCRLWIPGFASLAAPLYPLTRPKVPFTWTEAHQEAFGRIKEALLSAPALALPDLTKPFALYVDEKEGVARGVLTQTLGPWRRPVAYLSKKLDPVASGWPTCLKAIAAVALLLKDADKLTLGQNVLVIAPHNLESIVRQPPDRWMTNARMTHYQSLLLNERVSFAPPAILNPATLLPVESDDTPIHICSEILAEETGTRPDLRDQPLPGVPAWYTDGSSFIMDGRRQAGAAIVDNKRTVWASNLPEGTSAQKAELIALTQALRLAEGKSINIYTDSRYAFATAHVHGAIYKQRGWLTSAGKDIKNKEEILALLEAIHLPKRVAIIHCPGHQRGTDPVATGNRKADEAAKQAAQSTRILTETTKNAGKRTADGSEFEKRTADGSEFESPKKKAKVE

SEQ ID NO: 7533 - protein, 2218 aa, synthetic construct
MPAAKRVKLDGGDKKYSIGLDIGTNSVGWAVITDEYKVPSKKFKVLGNTDRHSIKKNLIGALLFDSGETAEATRLKRTARRRYTRRKNRICYLQEIFSNEMAKVDDSFFHRLEESFLVEEDKKHERHPIFGNIVDEVAYHEKYPTIYHLRKKLVDSTDKADLRLIYLALAHMIKFRGHFLIEGDLNPDNSDVDKLFIQLVQTYNQLFEENPINASGVDAKAILSARLSKSRRLENLIAQLPGEKKNGLFGNLIALSLGLTPNFKSNFDLAEDAKLQLSKDTYDDDLDNLLAQIGDQYADLFLAAKNLSDAILLSDILRVNTEITKAPLSASMIKRYDEHHQDLTLLKALVRQQLPEKYKEIFFDQSKNGYAGYIDGGASQEEFYKFIKPILEKMDGTEELLVKLNREDLLRKQRTFDNGSIPHQIHLGELHAILRRQEDFYPFLKDNREKIEKILTFRIPYYVGPLARGNSRFAWMTRKSEETITPWNFEEVVDKGASAQSFIERMTNFDKNLPNEKVLPKHSLLYEYFTVYNELTKVKYVTEGMRKPAFLSGEQKKAIVDLLFKTNRKVTVKQLKEDYFKKIECFDSVEISGVEDRFNASLGTYHDLLKIIKDKDFLDNEENEDILEDIVLTLTLFEDREMIEERLKTYAHLFDDKVMKQLKRRRYTGWGRLSRKLINGIRDKQSGKTILDFLKSDGFANRNFMQLIHDDSLTFKEDIQKAQVSGQGDSLHEHIANLAGSPAIKKGILQTVKVVDELVKVMGRHKPENIVIEMARENQTTQKGQKNSRERMKRIEEGIKELGSQILKEHPVENTQLQNEKLYLYYLQNGRDMYVDQELDINRLSDYDVDHIVPQSFLKDDSIDNKVLTRSDKARGKSDNVPSEEVVKKMKNYWRQLLNAKLITQRKFDNLTKAERGGLSELDKAGFIKRQLVETRQITKHVAQILDSRMNTKYDENDKLIREVKVITLKSKLVSDFRKDFQFYKVREINNYHHAHDAYLNAVVGTALIKKYPKLESEFVYGDYKVYDVRKMIAKSEQEIGKATAKYFFYSNIMNFFKTEITLANGEIRKRPLIETNGETGEIVWDKGRDFATVRKVLSMPQVNIVKKTEVQTGGFSKESILPKRNSDKLIARKKDWDPKKYGGFDSPTVAYSVLVVAKVEKGKSKKLKSVKELLGITIMERSSFEKNPIDFLEAKGYKEVKKDLIIKLPKYSLFELENGRKRMLASAGELQKGNELALPSKYVNFLYLASHYEKLKGSPEDNEQKQLFVEQHKHYLDEIIEQISEFSKRVILADANLDKVLSAYNKHRDKPIREQAENIIHLFTLTNLGAPAAFKYFDTTIDRKRYTSTKEVLDATLIHQSITGLYETRIDLSQLGGDGGPAPGGGEAAAKGGTLGDQGSRGSDPLPEPRVTLTVEGIPTEFLVNTGAEHSVLTKPMGKMGSKRTVVAGATGSKVYPWTTKRLLKIGQKQVTHSFLVIPECPAPLLGRDLLTKLKAQIQFSTEGPQVTWEDRPAMCLVLNLEEEYRLHEKPVPPSIDPSWLQLFPMVWAEKAGMGLANQVPPVVVELKSDASPVAVRQYPMSKEAREGIRPHIQRFLDLGILVPCQSPWNTPLLPVKKPGTNDYRPVQDLREVNKRVQDIHPTVPNPYNLLSSLPPSHTWYSVLDLKDAFFCLKLHPNSQPLFAFEWRDPEKGNTGQLTWTRLPQGFKNSPTLFNEALHRDLASFRALNPQVVMLQYVDDLLVAAPTYRDCKEGTRRLLQELSKLGYRVSAKKAQLCREEVTYLGYLLKGGKRWLTPARKATVMKIPTPTTPRQVREFLGKAGFCRLFIPGFASLAAPLYPLTRPKVPFTWTEAHQEAFGRIKEALLSAPALALPDLTKPFALYVDEKEGVARGVLTQTLGPWRRPVAYLSKKLDPVASGWPTCLKAIAAVALLLKDADKLTLGQNVLVIAPHNLESIVRQPPDRWMTNARMTHYQSLLLNERVSFAPPAILNPATLLPVESDDTPIHICSEILAEETGTRPDLRDQPLPGVPAWYTDGSSFIMDGRRQAGAAIVDNKRTVWASNLPEGTSAQKAELIALTQALRLAEGKSINIYTDSRYAFATAHVHGAIYKQRGWLTSAGKDIKNKEEILALLEAIHLPKRVAIIHCPGHQRGTDPVATGNRKADEAAKQAAQSTRILTETTKNAGKRTADGSEFEKRTADGSEFESPKKKAKVE

SEQ ID NO: 7534 - protein, 2096 aa, synthetic construct
MPAAKRVKLDGGDKKYSIGLDIGTNSVGWAVITDEYKVPSKKFKVLGNTDRHSIKKNLIGALLFDSGETAEATRLKRTARRRYTRRKNRICYLQEIFSNEMAKVDDSFFHRLEESFLVEEDKKHERHPIFGNIVDEVAYHEKYPTIYHLRKKLVDSTDKADLRLIYLALAHMIKFRGHFLIEGDLNPDNSDVDKLFIQLVQTYNQLFEENPINASGVDAKAILSARLSKSRRLENLIAQLPGEKKNGLFGNLIALSLGLTPNFKSNFDLAEDAKLQLSKDTYDDDLDNLLAQIGDQYADLFLAAKNLSDAILLSDILRVNTEITKAPLSASMIKRYDEHHQDLTLLKALVRQQLPEKYKEIFFDQSKNGYAGYIDGGASQEEFYKFIKPILEKMDGTEELLVKLNREDLLRKQRTFDNGSIPHQIHLGELHAILRRQEDFYPFLKDNREKIEKILTFRIPYYVGPLARGNSRFAWMTRKSEETITPWNFEEVVDKGASAQSFIERMTNFDKNLPNEKVLPKHSLLYEYFTVYNELTKVKYVTEGMRKPAFLSGEQKKAIVDLLFKTNRKVTVKQLKEDYFKKIECFDSVEISGVEDRFNASLGTYHDLLKIIKDKDFLDNEENEDILEDIVLTLTLFEDREMIEERLKTYAHLFDDKVMKQLKRRRYTGWGRLSRKLINGIRDKQSGKTILDFLKSDGFANRNFMQLIHDDSLTFKEDIQKAQVSGQGDSLHEHIANLAGSPAIKKGILQTVKVVDELVKVMGRHKPENIVIEMARENQTTQKGQKNSRERMKRIEEGIKELGSQILKEHPVENTQLQNEKLYLYYLQNGRDMYVDQELDINRLSDYDVDHIVPQSFLKDDSIDNKVLTRSDKARGKSDNVPSEEVVKKMKNYWRQLLNAKLITQRKFDNLTKAERGGLSELDKAGFIKRQLVETRQITKHVAQILDSRMNTKYDENDKLIREVKVITLKSKLVSDFRKDFQFYKVREINNYHHAHDAYLNAVVGTALIKKYPKLESEFVYGDYKVYDVRKMIAKSEQEIGKATAKYFFYSNIMNFFKTEITLANGEIRKRPLIETNGETGEIVWDKGRDFATVRKVLSMPQVNIVKKTEVQTGGFSKESILPKRNSDKLIARKKDWDPKKYGGFDSPTVAYSVLVVAKVEKGKSKKLKSVKELLGITIMERSSFEKNPIDFLEAKGYKEVKKDLIIKLPKYSLFELENGRKRMLASAGELQKGNELALPSKYVNFLYLASHYEKLKGSPEDNEQKQLFVEQHKHYLDEIIEQISEFSKRVILADANLDKVLSAYNKHRDKPIREQAENIIHLFTLTNLGAPAAFKYFDTTIDRKRYTSTKEVLDATLIHQSITGLYETRIDLSQLGGDGGPAPGGGEAAAKGGTLNLEDEYRLYETSAEPEVSPGSTWLSDFPQAWAETGGMGLAVRQAPLIIPLKATSTPVSIKQYPMSQEAKLGIKPHIQRLLDQGILVPCQSPWNTPLLPVKKPGTNDYRPVQDLREVNKRVEDIHPTVPNPYNLLSGLPPSHRWYTVLDLKDAFFCLRLHPTSQPLFAFEWRDPGMGISGQLTWTRLPQGFKNSPTLFNEALHRDLADFRIQHPDLILLQYVDDILLAATSELDCQQGTRALLLTLGNLGYRASAKKAQLCQKQVKYLGYLLKEGQRWLTEARKETVMGQPTPKTPRQLREFLGTAGFCRLWIPGFAEMAAPLYPLTKPGTLFNWGPDQQKAYQEIKQALLTAPALGLPDLTKPFELFVDEKQGYAKGVLTQKLGPWRRPVAYLSKKLDPVAAGWPPCLRMVAAIAVLRKDAGKLTMGQPLVILAPHAVEALVKQPPDRWLSNARMTHYQAMLLDTDRVQFGPVVALNPATLLPLPEEGAPHDCLEILAETHGTRPDLTDQPIPDADHTWYTDGSSFLQEGQRKAGAAVTTETEVIWARALPAGTSAQRAELIALTQALKMAEGKRLNVYTDSRYAFATAHIHGEIYRRRGWLTSEGREIKNKSEILALLKALFLPKRLSIIHCLGHQKGDSAEARGNRLADQAAREAAIKTPPDTSTLLAGKRTADGSEFEKRTADGSEFESPKKKAKVE

SEQ ID NO: 7535 - protein, 2096 aa, synthetic construct
MPAAKRVKLDGGDKKYSIGLDIGTNSVGWAVITDEYKVPSKKFKVLGNTDRHSIKKNLIGALLFDSGETAEATRLKRTARRRYTRRKNRICYLQEIFSNEMAKVDDSFFHRLEESFLVEEDKKHERHPIFGNIVDEVAYHEKYPTIYHLRKKLVDSTDKADLRLIYLALAHMIKFRGHFLIEGDLNPDNSDVDKLFIQLVQTYNQLFEENPINASGVDAKAILSARLSKSRRLENLIAQLPGEKKNGLFGNLIALSLGLTPNFKSNFDLAEDAKLQLSKDTYDDDLDNLLAQIGDQYADLFLAAKNLSDAILLSDILRVNTEITKAPLSASMIKRYDEHHQDLTLLKALVRQQLPEKYKEIFFDQSKNGYAGYIDGGASQEEFYKFIKPILEKMDGTEELLVKLNREDLLRKQRTFDNGSIPHQIHLGELHAILRRQEDFYPFLKDNREKIEKILTFRIPYYVGPLARGNSRFAWMTRKSEETITPWNFEEVVDKGASAQSFIERMTNFDKNLPNEKVLPKHSLLYEYFTVYNELTKVKYVTEGMRKPAFLSGEQKKAIVDLLFKTNRKVTVKQLKEDYFKKIECFDSVEISGVEDRFNASLGTYHDLLKIIKDKDFLDNEENEDILEDIVLTLTLFEDREMIEERLKTYAHLFDDKVMKQLKRRRYTGWGRLSRKLINGIRDKQSGKTILDFLKSDGFANRNFMQLIHDDSLTFKEDIQKAQVSGQGDSLHEHIANLAGSPAIKKGILQTVKVVDELVKVMGRHKPENIVIEMARENQTTQKGQKNSRERMKRIEEGIKELGSQILKEHPVENTQLQNEKLYLYYLQNGRDMYVDQELDINRLSDYDVDHIVPQSFLKDDSIDNKVLTRSDKARGKSDNVPSEEVVKKMKNYWRQLLNAKLITQRKFDNLTKAERGGLSELDKAGFIKRQLVETRQITKHVAQILDSRMNTKYDENDKLIREVKVITLKSKLVSDFRKDFQFYKVREINNYHHAHDAYLNAVVGTALIKKYPKLESEFVYGDYKVYDVRKMIAKSEQEIGKATAKYFFYSNIMNFFKTEITLANGEIRKRPLIETNGETGEIVWDKGRDFATVRKVLSMPQVNIVKKTEVQTGGFSKESILPKRNSDKLIARKKDWDPKKYGGFDSPTVAYSVLVVAKVEKGKSKKLKSVKELLGITIMERSSFEKNPIDFLEAKGYKEVKKDLIIKLPKYSLFELENGRKRMLASAGELQKGNELALPSKYVNFLYLASHYEKLKGSPEDNEQKQLFVEQHKHYLDEIIEQISEFSKRVILADANLDKVLSAYNKHRDKPIREQAENIIHLFTLTNLGAPAAFKYFDTTIDRKRYTSTKEVLDATLIHQSITGLYETRIDLSQLGGDGGPAPGGGEAAAKGGTLGIEDEYRLHETSTEPDVSLGSTWLSDFPQAWAETGGMGLAVRQAPLIIPLKATSTPVSIQQYPMSHEARLGIKPHIQRLLDQGILVPCQSPWNTPLLPVKKPGTNDYRPVQDLREVNKRVEDIHPTVPNPYNLLSGLPPSHQWYTVLDLKDAFFCLRLHPTSQPLFAFEWRDPGMGISGQLTWTRLPQGFKNSPTLFNEALHRDLADFRIQHPDLILLQYVDDILLAATSELDCQQGTRALLQTLGDLGYRASAKKAQICQKQVKYLGYLLREGQRWLTEARKETVMGQPVPKTPRQLREFLGTAGFCRLWIPGFAEMAAPLYPLTKPGTLFSWGPDQQKAYQEIKQALLTAPALGLPDLTKPFELFVDEKQGYAKGVLTQKLGPWRRPVAYLSKKLDPVAAGWPPCLRMVAAIAVLTKDAGKLTMGQPLVILAPHAVEALVKQPPDRWLSNARMTHYQAMLLDTDRVQFGPVVALNPATLLPLPEEGAPHDCLEILAETHGTRPDLTDQPIPDADHTWYTDGSSFLQEGQRKAGAAVTTETEVIWAGALPAGTSAQRAELIALTQALKMAEGKRLNVYTDSRYAFATAHIHGEIYRRRGWLTSEGREIKNKSEILALLKALFLPKRLSIIHCLGHQKGDSAEARGNRLADQAAREAAIKTPPDTSTLLAGKRTADGSEFEKRTADGSEFESPKKKAKVE

SEQ ID NO: 7536 - protein, 2096 aa, synthetic construct
MPAAKRVKLDGGDKKYSIGLDIGTNSVGWAVITDEYKVPSKKFKVLGNTDRHSIKKNLIGALLFDSGETAEATRLKRTARRRYTRRKNRICYLQEIFSNEMAKVDDSFFHRLEESFLVEEDKKHERHPIFGNIVDEVAYHEKYPTIYHLRKKLVDSTDKADLRLIYLALAHMIKFRGHFLIEGDLNPDNSDVDKLFIQLVQTYNQLFEENPINASGVDAKAILSARLSKSRRLENLIAQLPGEKKNGLFGNLIALSLGLTPNFKSNFDLAEDAKLQLSKDTYDDDLDNLLAQIGDQYADLFLAAKNLSDAILLSDILRVNTEITKAPLSASMIKRYDEHHQDLTLLKALVRQQLPEKYKEIFFDQSKNGYAGYIDGGASQEEFYKFIKPILEKMDGTEELLVKLNREDLLRKQRTFDNGSIPHQIHLGELHAILRRQEDFYPFLKDNREKIEKILTFRIPYYVGPLARGNSRFAWMTRKSEETITPWNFEEVVDKGASAQSFIERMTNFDKNLPNEKVLPKHSLLYEYFTVYNELTKVKYVTEGMRKPAFLSGEQKKAIVDLLFKTNRKVTVKQLKEDYFKKIECFDSVEISGVEDRFNASLGTYHDLLKIIKDKDFLDNEENEDILEDIVLTLTLFEDREMIEERLKTYAHLFDDKVMKQLKRRRYTGWGRLSRKLINGIRDKQSGKTILDFLKSDGFANRNFMQLIHDDSLTFKEDIQKAQVSGQGDSLHEHIANLAGSPAIKKGILQTVKVVDELVKVMGRHKPENIVIEMARENQTTQKGQKNSRERMKRIEEGIKELGSQILKEHPVENTQLQNEKLYLYYLQNGRDMYVDQELDINRLSDYDVDHIVPQSFLKDDSIDNKVLTRSDKARGKSDNVPSEEVVKKMKNYWRQLLNAKLITQRKFDNLTKAERGGLSELDKAGFIKRQLVETRQITKHVAQILDSRMNTKYDENDKLIREVKVITLKSKLVSDFRKDFQFYKVREINNYHHAHDAYLNAVVGTALIKKYPKLESEFVYGDYKVYDVRKMIAKSEQEIGKATAKYFFYSNIMNFFKTEITLANGEIRKRPLIETNGETGEIVWDKGRDFATVRKVLSMPQVNIVKKTEVQTGGFSKESILPKRNSDKLIARKKDWDPKKYGGFDSPTVAYSVLVVAKVEKGKSKKLKSVKELLGITIMERSSFEKNPIDFLEAKGYKEVKKDLIIKLPKYSLFELENGRKRMLASAGELQKGNELALPSKYVNFLYLASHYEKLKGSPEDNEQKQLFVEQHKHYLDEIIEQISEFSKRVILADANLDKVLSAYNKHRDKPIREQAENIIHLFTLTNLGAPAAFKYFDTTIDRKRYTSTKEVLDATLIHQSITGLYETRIDLSQLGGDGGPAPGGGEAAAKGGTLNIEDEYRLHETSKEPDVSLGSTWLSDFPQAWAETGGMGLAVRQAPLIIPLKATSTPVSIKQYPMSQEARLGIKPHIQRLLDQGILVPCQSPWNTPLLPVKKPGTNDYRPVQDLREVNKRVEDIHPTVPNPYNLLSGLPPSHQWYTVLDLKDAFFCLRLHPTSQPLFAFEWRDPEMGISGQLTWTRLPQGFKNSPTLFNEALHRDLAGFRIQHPDLILLQYVDDLLLAATSELDCQQGTRALLQTLGDLGYRASAKKAQICQKQVKYLGYLLKEGQRWLTEARKETVMGQPIPKTPRQLREFLGTAGFCRLWIPGFAEMAAPLYPLTKPGTLFNWGPDQQKAFQEIKQALLTAPALGLPDLTKPFELFVDEKQGYAKGVLTQKLGPWRRPVAYLSKKLDPVAAGWPPCLRMVAAIAVLTKDAGKLTMGQPLVILAPHAVEALVKQPPDRWLSNARMTHYQALLLDTDRVQFGPVVALNPATLLPLPEEGLQHDCLDILAEAHGTRSDLMDQPLPDADHTWYTDGSSFLQEGQRKAGAAVTTETEVIWARALPAGTSAQRAELIALTQALKMAEGKKLNVYTDSRYAFATAHIHGEIYRRRGWLTSEGKEIKNKDEILALLKALFLPKRLSIIHCPGHQKGNSAEARGNRMADQAAREVATRETPETSTLLAGKRTADGSEFEKRTADGSEFESPKKKAKVE

SEQ ID NO: 7537 - protein, 2096 aa, synthetic construct
MPAAKRVKLDGGDKKYSIGLDIGTNSVGWAVITDEYKVPSKKFKVLGNTDRHSIKKNLIGALLFDSGETAEATRLKRTARRRYTRRKNRICYLQEIFSNEMAKVDDSFFHRLEESFLVEEDKKHERHPIFGNIVDEVAYHEKYPTIYHLRKKLVDSTDKADLRLIYLALAHMIKFRGHFLIEGDLNPDNSDVDKLFIQLVQTYNQLFEENPINASGVDAKAILSARLSKSRRLENLIAQLPGEKKNGLFGNLIALSLGLTPNFKSNFDLAEDAKLQLSKDTYDDDLDNLLAQIGDQYADLFLAAKNLSDAILLSDILRVNTEITKAPLSASMIKRYDEHHQDLTLLKALVRQQLPEKYKEIFFDQSKNGYAGYIDGGASQEEFYKFIKPILEKMDGTEELLVKLNREDLLRKQRTFDNGSIPHQIHLGELHAILRRQEDFYPFLKDNREKIEKILTFRIPYYVGPLARGNSRFAWMTRKSEETITPWNFEEVVDKGASAQSFIERMTNFDKNLPNEKVLPKHSLLYEYFTVYNELTKVKYVTEGMRKPAFLSGEQKKAIVDLLFKTNRKVTVKQLKEDYFKKIECFDSVEISGVEDRFNASLGTYHDLLKIIKDKDFLDNEENEDILEDIVLTLTLFEDREMIEERLKTYAHLFDDKVMKQLKRRRYTGWGRLSRKLINGIRDKQSGKTILDFLKSDGFANRNFMQLIHDDSLTFKEDIQKAQVSGQGDSLHEHIANLAGSPAIKKGILQTVKVVDELVKVMGRHKPENIVIEMARENQTTQKGQKNSRERMKRIEEGIKELGSQILKEHPVENTQLQNEKLYLYYLQNGRDMYVDQELDINRLSDYDVDHIVPQSFLKDDSIDNKVLTRSDKARGKSDNVPSEEVVKKMKNYWRQLLNAKLITQRKFDNLTKAERGGLSELDKAGFIKRQLVETRQITKHVAQILDSRMNTKYDENDKLIREVKVITLKSKLVSDFRKDFQFYKVREINNYHHAHDAYLNAVVGTALIKKYPKLESEFVYGDYKVYDVRKMIAKSEQEIGKATAKYFFYSNIMNFFKTEITLANGEIRKRPLIETNGETGEIVWDKGRDFATVRKVLSMPQVNIVKKTEVQTGGFSKESILPKRNSDKLIARKKDWDPKKYGGFDSPTVAYSVLVVAKVEKGKSKKLKSVKELLGITIMERSSFEKNPIDFLEAKGYKEVKKDLIIKLPKYSLFELENGRKRMLASAGELQKGNELALPSKYVNFLYLASHYEKLKGSPEDNEQKQLFVEQHKHYLDEIIEQISEFSKRVILADANLDKVLSAYNKHRDKPIREQAENIIHLFTLTNLGAPAAFKYFDTTIDRKRYTSTKEVLDATLIHQSITGLYETRIDLSQLGGDGGPAPGGGEAAAKGGTLNIEDEHRLHETSKEPDVSLGSTWLSDFPQAWAETGGMGLAVRQAPLIIPLKATSTPVSIKQYPMSQEARLGIKPHIQRLLDQGILVPCQSPWNTPLLPVKKPGTNDYRPVQDLREVNKRVEDIHPTVPNPYNLLSGLPPSHQWYTVLDLKDAFFCLRLHPTSQPLFAFEWRDPEMGISGQLTWTRLPQGFKNSPTLFNEALHRDLADFRIQHPDLILLQYVDDLLLAATSELDCQQGTRALLQTLGNLGYRASAKKAQICQKQVKYLGYLLKEGQRWLTEARKETVMGQPTPKTPRQLREFLGTAGFCRLWIPGFAEMAAPLYPLTKPGTLFNWGPDQQKAYQEIKQALLTAPALGLPDLTKPFELFVDEKQGYAKGVLTQKLGPWRRPVAYLSKKLDPVAAGWPPCLRMVAAIAVLTKDAGKLTMGQPLVILAPHAVEALVKQPPDRWLSNARMTHYQALLLDTDRVQFGPVVALNPATLLPLPEEGLQHNCLDILAEAHGTRPDLTDQPLPDADHTWYTDGSSLLQEGQRKAGAAVTTETEVIWAKALPAGTSAQRAELIALTQALKMAEGKKLNVYTDSRYAFATAHIHGEIYRRRGWLTSEGKEIKNKDEILALLKALFLPKRLSIIHCPGHQKGHSAEARGNRMADQAARKAAITETPDTSTLLAGKRTADGSEFEKRTADGSEFESPKKKAKVE

SEQ ID NO: 7538 - protein, 2096 aa, synthetic construct
MPAAKRVKLDGGDKKYSIGLDIGTNSVGWAVITDEYKVPSKKFKVLGNTDRHSIKKNLIGALLFDSGETAEATRLKRTARRRYTRRKNRICYLQEIFSNEMAKVDDSFFHRLEESFLVEEDKKHERHPIFGNIVDEVAYHEKYPTIYHLRKKLVDSTDKADLRLIYLALAHMIKFRGHFLIEGDLNPDNSDVDKLFIQLVQTYNQLFEENPINASGVDAKAILSARLSKSRRLENLIAQLPGEKKNGLFGNLIALSLGLTPNFKSNFDLAEDAKLQLSKDTYDDDLDNLLAQIGDQYADLFLAAKNLSDAILLSDILRVNTEITKAPLSASMIKRYDEHHQDLTLLKALVRQQLPEKYKEIFFDQSKNGYAGYIDGGASQEEFYKFIKPILEKMDGTEELLVKLNREDLLRKQRTFDNGSIPHQIHLGELHAILRRQEDFYPFLKDNREKIEKILTFRIPYYVGPLARGNSRFAWMTRKSEETITPWNFEEVVDKGASAQSFIERMTNFDKNLPNEKVLPKHSLLYEYFTVYNELTKVKYVTEGMRKPAFLSGEQKKAIVDLLFKTNRKVTVKQLKEDYFKKIECFDSVEISGVEDRFNASLGTYHDLLKIIKDKDFLDNEENEDILEDIVLTLTLFEDREMIEERLKTYAHLFDDKVMKQLKRRRYTGWGRLSRKLINGIRDKQSGKTILDFLKSDGFANRNFMQLIHDDSLTFKEDIQKAQVSGQGDSLHEHIANLAGSPAIKKGILQTVKVVDELVKVMGRHKPENIVIEMARENQTTQKGQKNSRERMKRIEEGIKELGSQILKEHPVENTQLQNEKLYLYYLQNGRDMYVDQELDINRLSDYDVDHIVPQSFLKDDSIDNKVLTRSDKARGKSDNVPSEEVVKKMKNYWRQLLNAKLITQRKFDNLTKAERGGLSELDKAGFIKRQLVETRQITKHVAQILDSRMNTKYDENDKLIREVKVITLKSKLVSDFRKDFQFYKVREINNYHHAHDAYLNAVVGTALIKKYPKLESEFVYGDYKVYDVRKMIAKSEQEIGKATAKYFFYSNIMNFFKTEITLANGEIRKRPLIETNGETGEIVWDKGRDFATVRKVLSMPQVNIVKKTEVQTGGFSKESILPKRNSDKLIARKKDWDPKKYGGFDSPTVAYSVLVVAKVEKGKSKKLKSVKELLGITIMERSSFEKNPIDFLEAKGYKEVKKDLIIKLPKYSLFELENGRKRMLASAGELQKGNELALPSKYVNFLYLASHYEKLKGSPEDNEQKQLFVEQHKHYLDEIIEQISEFSKRVILADANLDKVLSAYNKHRDKPIREQAENIIHLFTLTNLGAPAAFKYFDTTIDRKRYTSTKEVLDATLIHQSITGLYETRIDLSQLGGDGGPAPGGGEAAAKGGTLNIEDEHRLHETSKEPDVSLGSTWLSDFPQAWAETGGMGLAVRQAPLIIPLKATSTPVSIKQYPMSQEARLGIKPHIQRLLDQGILVPCQSPWNTPLLPVKKPGTNDYRPVQDLREVNKRVEDIHPTVPNPYNLLSGLPPSHQWYTVLDLKDAFFCLRLHPTSQPLFAFEWRDPEMGISGQLTWTRLPQGFKNSPTLFDEALHRDLADFRIQHPDLILLQYVDDLLLAATSELDCQQGTRALLQTLGNLGYRASAKKAQICQKQVKYLGYLLKEGQRWLTEARKETVMGQPTPKTPRQLREFLGTAGFCRLWIPGFAEMAAPLYPLTKTGTLFNWGPDQQKAYQEIKQALLTAPALGLPDLTKPFELFVDEKQGYAKGVLTQKLGPWRRPVAYLSKKLDPVAAGWPPCLRMVAAIAVLTKDAGKLTMGQPLVILAPHAVEALVKQPPDRWLSNARMTHYQALLLDTDRVQFGPVVALNPATLLPLPEEGLQHNCLDILAEAHGTRPDLTDQPLPDADHTWYTDGSSLLQEGQRKAGAAVTTETEVIWAKALPAGTSAQRAELIALTQALKMAEGKKLNVYTDSRYAFATAHIHGEIYRRRGLLTSEGKEIKNKDEILALLKALFLPKRLSIIHCPGHQKGHSAEARGNRMADQAARKAAITETPDTSTLLAGKRTADGSEFEKRTADGSEFESPKKKAKVE

SEQ ID NO: 7539 - protein, 2096 aa, synthetic construct; identical to SEQ ID NO: 7537

SEQ ID NO: 7540 - protein, 2090 aa, synthetic construct
MPAAKRVKLDGGDKKYSIGLDIGTNSVGWAVITDEYKVPSKKFKVLGNTDRHSIKKNLIGALLFDSGETAEATRLKRTARRRYTRRKNRICYLQEIFSNEMAKVDDSFFHRLEESFLVEEDKKHERHPIFGNIVDEVAYHEKYPTIYHLRKKLVDSTDKADLRLIYLALAHMIKFRGHFLIEGDLNPDNSDVDKLFIQLVQTYNQLFEENPINASGVDAKAILSARLSKSRRLENLIAQLPGEKKNGLFGNLIALSLGLTPNFKSNFDLAEDAKLQLSKDTYDDDLDNLLAQIGDQYADLFLAAKNLSDAILLSDILRVNTEITKAPLSASMIKRYDEHHQDLTLLKALVRQQLPEKYKEIFFDQSKNGYAGYIDGGASQEEFYKFIKPILEKMDGTEELLVKLNREDLLRKQRTFDNGSIPHQIHLGELHAILRRQEDFYPFLKDNREKIEKILTFRIPYYVGPLARGNSRFAWMTRKSEETITPWNFEEVVDKGASAQSFIERMTNFDKNLPNEKVLPKHSLLYEYFTVYNELTKVKYVTEGMRKPAFLSGEQKKAIVDLLFKTNRKVTVKQLKEDYFKKIECFDSVEISGVEDRFNASLGTYHDLLKIIKDKDFLDNEENEDILEDIVLTLTLFEDREMIEERLKTYAHLFDDKVMKQLKRRRYTGWGRLSRKLINGIRDKQSGKTILDFLKSDGFANRNFMQLIHDDSLTFKEDIQKAQVSGQGDSLHEHIANLAGSPAIKKGILQTVKVVDELVKVMGRHKPENIVIEMARENQTTQKGQKNSRERMKRIEEGIKELGSQILKEHPVENTQLQNEKLYLYYLQNGRDMYVDQELDINRLSDYDVDHIVPQSFLKDDSIDNKVLTRSDKARGKSDNVPSEEVVKKMKNYWRQLLNAKLITQRKFDNLTKAERGGLSELDKAGFIKRQLVETRQITKHVAQILDSRMNTKYDENDKLIREVKVITLKSKLVSDFRKDFQFYKVREINNYHHAHDAYLNAVVGTALIKKYPKLESEFVYGDYKVYDVRKMIAKSEQEIGKATAKYFFYSNIMNFFKTEITLANGEIRKRPLIETNGETGEIVWDKGRDFATVRKVLSMPQVNIVKKTEVQTGGFSKESILPKRNSDKLIARKKDWDPKKYGGFDSPTVAYSVLVVAKVEKGKSKKLKSVKELLGITIMERSSFEKNPIDFLEAKGYKEVKKDLIIKLPKYSLFELENGRKRMLASAGELQKGNELALPSKYVNFLYLASHYEKLKGSPEDNEQKQLFVEQHKHYLDEIIEQISEFSKRVILADANLDKVLSAYNKHRDKPIREQAENIIHLFTLTNLGAPAAFKYFDTTIDRKRYTSTKEVLDATLIHQSITGLYETRIDLSQLGGDGGPAPGGGEAAAKGGTLQLDDEYRLYSPLVKPDQNIQFWLEQFPQAWAETAGMGLAKQVPPQVIQLKASATPVSVRQYPLSKEAQEGIRPHVQRLIQQGILVPVQSPWNTPLLPVRKPGTNDYRPVQDLREVNKRVQDIHPTVPNPYNLLCALPPQRSWYTVLDLKDAFFCLRLHPTSQPLFAFEWRDPGTGRTGQLTWTRLPQGFKNSPTIFDEALHRDLANFRIQHPQVTLLQYVDDLLLAGATKQDCLEGTKALLLELSDLGYRASAKKAQICRREVTYLGYSLRDGQRWLTEARKKTVVQIPAPTTAKQVREFLGTAGFCRLWIPGFATLAAPLYPLTKEKGEFSWAPEHQKAFDAIKKALLSAPALALPDVTKPFTLYVDERKGVARGVLTQTLGPWRRPVAYLSKKLDPVASGWPVCLKAIAAVAILVKDADKLTLGQNITVIAPHALENIVRQPPDRWMTNARMTHYQSLLLTERVTFAPPAALNPATLLPEETDEPVTHDCHQLLIEETGVRKDLTDIPLTGEVLTWFTDGSSYVVEGKRMAGAAVVDGTRTIWASSLPEGTSAQKAELMALTQALRLAEGKSINIYTDSRYAFATAHVHGAIYKQRGLLTSAGREIKNKEEILSLLEALHLPKRLAIIHCPGHQKAKDPISRGNQMADRVAKQAAQGVNLLAGKRTADGSEFEKRTADGSEFESPKKKAKVE

SEQ ID NO: 7541 - protein, 2090 aa, synthetic construct; identical to SEQ ID NO: 7540

SEQ ID NO: 7542 - protein, 2176 aa, synthetic construct
MPAAKRVKLDGGDKKYSIGLDIGTNSVGWAVITDEYKVPSKKFKVLGNTDRHSIKKNLIGALLFDSGETAEATRLKRTARRRYTRRKNRICYLQEIFSNEMAKVDDSFFHRLEESFLVEEDKKHERHPIFGNIVDEVAYHEKYPTIYHLRKKLVDSTDKADLRLIYLALAHMIKFRGHFLIEGDLNPDNSDVDKLFIQLVQTYNQLFEENPINASGVDAKAILSARLSKSRRLENLIAQLPGEKKNGLFGNLIALSLGLTPNFKSNFDLAEDAKLQLSKDTYDDDLDNLLAQIGDQYADLFLAAKNLSDAILLSDILRVNTEITKAPLSASMIKRYDEHHQDLTLLKALVRQQLPEKYKEIFFDQSKNGYAGYIDGGASQEEFYKFIKPILEKMDGTEELLVKLNREDLLRKQRTFDNGSIPHQIHLGELHAILRRQEDFYPFLKDNREKIEKILTFRIPYYVGPLARGNSRFAWMTRKSEETITPWNFEEVVDKGASAQSFIERMTNFDKNLPNEKVLPKHSLLYEYFTVYNELTKVKYVTEGMRKPAFLSGEQKKAIVDLLFKTNRKVTVKQLKEDYFKKIECFDSVEISGVEDRFNASLGTYHDLLKIIKDKDFLDNEENEDILEDIVLTLTLFEDREMIEERLKTYAHLFDDKVMKQLKRRRYTGWGRLSRKLINGIRDKQSGKTILDFLKSDGFANRNFMQLIHDDSLTFKEDIQKAQVSGQGDSLHEHIANLAGSPAIKKGILQTVKVVDELVKVMGRHKPENIVIEMARENQTTQKGQKNSRERMKRIEEGIKELGSQILKEHPVENTQLQNEKLYLYYLQNGRDMYVDQELDINRLSDYDVDHIVPQSFLKDDSIDNKVLTRSDKARGKSDNVPSEEVVKKMKNYWRQLLNAKLITQRKFDNLTKAERGGLSELDKAGFIKRQLVETRQITKHVAQILDSRMNTKYDENDKLIREVKVITLKSKLVSDFRKDFQFYKVREINNYHHAHDAYLNAVVGTALIKKYPKLESEFVYGDYKVYDVRKMIAKSEQEIGKATAKYFFYSNIMNFFKTEITLANGEIRKRPLIETNGETGEIVWDKGRDFATVRKVLSMPQVNIVKKTEVQTGGFSKESILPKRNSDKLIARKKDWDPKKYGGFDSPTVAYSVLVVAKVEKGKSKKLKSVKELLGITIMERSSFEKNPIDFLEAKGYKEVKKDLIIKLPKYSLFELENGRKRMLASAGELQKGNELALPSKYVNFLYLASHYEKLKGSPEDNEQKQLFVEQHKHYLDEIIEQISEFSKRVILADANLDKVLSAYNKHRDKPIREQAENIIHLFTLTNLGAPAAFKYFDTTIDRKRYTSTKEVLDATLIHQSITGLYETRIDLSQLGGDGGPAPGGGEAAAKGGMDPLQLLQPLEAEIKGTKLKAHWNSGATITCVPEAFLEDERPIQTMLIKTIHGEKQQDVYYLTFKVQGRKVEAEVLASPYDYILLNPSDVPWLMKKPLQLTVLVPLHEYQERLLQQTALPKEQKELLQKLFLKYDALWQHWENQVGHRRIKPHNIATGTLAPRPQKQYPINPKAKPSIQIVIDDLLKQGVLIQQNSTMNTPVYPVPKPDGKWRMVLDYREVNKTIPLIAAQNQHSAGILSSIYRGKYKTTLDLTNGFWAHPITPESYWLTAFTWQGKQYCWTRLPQGFLNSPALFNADVVDLLKEIPNVQAYVDDIYISHDDPQEHLEQLEKIFSILLNAGYVVSLKKSEIAQREVEFLGFNITKEGRGLTDTFKQKLLNITPPKDLKQLQSILGLLNFARNFIPNYSELVKPLYTIVAPANGKFISWTEDNSNQLQHIISVLNQADNLEERNPETRLIIKVNSSPSAGYIRYYNEGSKRPIMYVNYIFSKAEAKFTQTEKLLTTMHKGLIKAMDLAMGQEILVYSPIVSMTKIQRTPLPERKALPVRWITWMTYLEDPRIQFHYDKSLPELQQIPNVTEDVIAKTKHPSEFAMVFYTDGSAIKHPDVNKSHSAGMGIAQVQFIPEYKIVHQWSIPLGDHTAQLAEIAAVEFACKKALKISGPVLIVTDSFYVAESANKELPYWKSNGFLNNKKKPLRHVSKWKSIAECLQLKPDIIIMHEKGHQQPMTTLHTEGNNLADKLATQGSYVVHAGKRTADGSEFEKRTADGSEFESPKKKAKVE

SEQ ID NO: 7543 - protein, 2087 aa, synthetic construct
MPAAKRVKLDGGDKKYSIGLDIGTNSVGWAVITDEYKVPSKKFKVLGNTDRHSIKKNLIGALLFDSGETAEATRLKRTARRRYTRRKNRICYLQEIFSNEMAKVDDSFFHRLEESFLVEEDKKHERHPIFGNIVDEVAYHEKYPTIYHLRKKLVDSTDKADLRLIYLALAHMIKFRGHFLIEGDLNPDNSDVDKLFIQLVQTYNQLFEENPINASGVDAKAILSARLSKSRRLENLIAQLPGEKKNGLFGNLIALSLGLTPNFKSNFDLAEDAKLQLSKDTYDDDLDNLLAQIGDQYADLFLAAKNLSDAILLSDILRVNTEITKAPLSASMIKRYDEHHQDLTLLKALVRQQLPEKYKEIFFDQSKNGYAGYIDGGASQEEFYKFIKPILEKMDGTEELLVKLNREDLLRKQRTFDNGSIPHQIHLGELHAILRRQEDFYPFLKDNREKIEKILTFRIPYYVGPLARGNSRFAWMTRKSEETITPWNFEEVVDKGASAQSFIERMTNFDKNLPNEKVLPKHSLLYEYFTVYNELTKVKYVTEGMRKPAFLSGEQKKAIVDLLFKTNRKVTVKQLKEDYFKKIECFDSVEISGVEDRFNASLGTYHDLLKIIKDKDFLDNEENEDILEDIVLTLTLFEDREMIEERLKTYAHLFDDKVMKQLKRRRYTGWGRLSRKLINGIRDKQSGKTILDFLKSDGFANRNFMQLIHDDSLTFKEDIQKAQVSGQGDSLHEHIANLAGSPAIKKGILQTVKVVDELVKVMGRHKPENIVIEMARENQTTQKGQKNSRERMKRIEEGIKELGSQILKEHPVENTQLQNEKLYLYYLQNGRDMYVDQELDINRLSDYDVDHIVPQSFLKDDSIDNKVLTRSDKARGKSDNVPSEEVVKKMKNYWRQLLNAKLITQRKFDNLTKAERGGLSELDKAGFIKRQLVETRQITKHVAQILDSRMNTKYDENDKLIREVKVITLKSKLVSDFRKDFQFYKVREINNYHHAHDAYLNAVVGTALIKKYPKLESEFVYGDYKVYDVRKMIAKSEQEIGKATAKYFFYSNIMNFFKTEITLANGEIRKRPLIETNGETGEIVWDKGRDFATVRKVLSMPQVNIVKKTEVQTGGFSKESILPKRNSDKLIARKKDWDPKKYGGFDSPTVAYSVLVVAKVEKGKSKKLKSVKELLGITIMERSSFEKNPIDFLEAKGYKEVKKDLIIKLPKYSLFELENGRKRMLASAGELQKGNELALPSKYVNFLYLASHYEKLKGSPEDNEQKQLFVEQHKHYLDEIIEQISEFSKRVILADANLDKVLSAYNKHRDKPIREQAENIIHLFTLTNLGAPAAFKYFDTTIDRKRYTSTKEVLDATLIHQSITGLYETRIDLSQLGGDGGPAPGGGEAAAKGGIPWLMKKPLQLTTLVPLQEYEERLLKQTMLTGSYKEKLQSLFLKYDALWQHWENQVGHRRIKPHHIATGTVNPRPQKQYPINPKAKASIQTVINDLLKQGVLIQQNSIMNTPVYPVPKPDGKWRMVLDYREVNKTIPLIAAQNQHSAGILSSIFRGKYKTTLDLSNGFWAHSITPESYWLTAFTWLGQQYCWTRLPQGFLNSPALFNADVVDLLKEVPNVQVYVDDIYISHDDPREHLEQLEKVFSLLLNAGYVVSLKKSEIAQHEVEFLGFNITKEGRGLTETFKQKLLNITPPRDLKQLQSILGKLNFARNFIPNFSELVKPLYNIIATAPGKYITWTTDNSQQLQNIISMLNSAENLEERNPEVRLIMKVNTSPSAGYIRFYNEFAKRPIMYLNYVYTKAEVKFTNTEKLLTTIHKGLIKALDLGMGQEILVYSPIVSMTKIQKTPLPERKALPIRWITWMSYLEDPRIQFHYDKTLPELQQVPTVTDDIIAKIKHPSEFSMVFYTDGSAIKHPNVNKSHNAGMGIAQVQFKPEFTVINTWSIPLGDHTAQLAEVAAVEFACKKALKIDGPVLIVTDSFYVAESVNKELPYWQSNGFFNNKKKPLKHVSKWKSIADCIQLKPDIIIIHEKGHQPTASTFHTEGNNLADKLATQGSYVVNAGKRTADGSEFEKRTADGSEFESPKKKAKVE

SEQ ID NO: 7544 - protein, 2094 aa, synthetic construct
MPAAKRVKLDGGDKKYSIGLDIGTNSVGWAVITDEYKVPSKKFKVLGNTDRHSIKKNLIGALLFDSGETAEATRLKRTARRRYTRRKNRICYLQEIFSNEMAKVDDSFFHRLEESFLVEEDKKHERHPIFGNIVDEVAYHEKYPTIYHLRKKLVDSTDKADLRLIYLALAHMIKFRGHFLIEGDLNPDNSDVDKLFIQLVQTYNQLFEENPINASGVDAKAILSARLSKSRRLENLIAQLPGEKKNGLFGNLIALSLGLTPNFKSNFDLAEDAKLQLSKDTYDDDLDNLLAQIGDQYADLFLAAKNLSDAILLSDILRVNTEITKAPLSASMIKRYDEHHQDLTLLKALVRQQLPEKYKEIFFDQSKNGYAGYIDGGASQEEFYKFIKPILEKMDGTEELLVKLNREDLLRKQRTFDNGSIPHQIHLGELHAILRRQEDFYPFLKDNREKIEKILTFRIPYYVGPLARGNSRFAWMTRKSEETITPWNFEEVVDKGASAQSFIERMTNFDKNLPNEKVLPKHSLLYEYFTVYNELTKVKYVTEGMRKPAFLSGEQKKAIVDLLFKTNRKVTVKQLKEDYFKKIECFDSVEISGVEDRFNASLGTYHDLLKIIKDKDFLDNEENEDILEDIVLTLTLFEDREMIEERLKTYAHLFDDKVMKQLKRRRYTGWGRLSRKLINGIRDKQSGKTILDFLKSDGFANRNFMQLIHDDSLTFKEDIQKAQVSGQGDSLHEHIANLAGSPAIKKGILQTVKVVDELVKVMGRHKPENIVIEMARENQTTQKGQKNSRERMKRIEEGIKELGSQILKEHPVENTQLQNEKLYLYYLQNGRDMYVDQELDINRLSDYDVDHIVPQSFLKDDSIDNKVLTRSDKARGKSDNVPSEEVVKKMKNYWRQLLNAKLITQRKFDNLTKAERGGLSELDKAGFIKRQLVETRQITKHVAQILDSRMNTKYDENDKLIREVKVITLKSKLVSDFRKDFQFYKVREINNYHHAHDAYLNAVVGTALIKKYPKLESEFVYGDYKVYDVRKMIAKSEQEIGKATAKYFFYSNIMNFFKTEITLANGEIRKRPLIETNGETGEIVWDKGRDFATVRKVLSMPQVNIVKKTEVQTGGFSKESILPKRNSDKLIARKKDWDPKKYGGFDSPTVAYSVLVVAKVEKGKSKKLKSVKELLGITIMERSSFEKNPIDFLEAKGYKEVKKDLIIKLPKYSLFELENGRKRMLASAGELQKGNELALPSKYVNFLYLASHYEKLKGSPEDNEQKQLFVEQHKHYLDEIIEQISEFSKRVILADANLDKVLSAYNKHRDKPIREQAENIIHLFTLTNLGAPAAFKYFDTTIDRKRYTSTKEVLDATLIHQSITGLYETRIDLSQLGGDGGPAPGGGEAAAKGGVLNLEEEYRLHEKPVPSSIDPSWLQLFPTVWAERAGMGLANQVPPVVVELRSGASPVAVRQYPMSKEAREGIRPHIQRFLDLGVLVPCQSPWNTPLLPVKKPGTNDYRPVQDLREINKRVQDIHPTVPNPYNLLSSLPPSHTWYSVLDLKDAFFCLKLHPNSQPLFAFEWRDPEKGNTGQLTWTRLPQGFKNSPTLFNEALHRDLAPFRALNPQVVLLQYVDDLLVAAPTYRDCKEGTQKLLQELSKLGYRVSAKKAQLCQKEVTYLGYLLKEGKRWLTPARKATVMKIPPPTTPRQVREFLGTAGFCRLWIPGFASLAAPLYPLTKPSIPFIWTEEHQKAFDRIKEALLSAPALALPDLTKPFTLYVDERAGVARGVLTQTLGPWRRPVAYLSKKLDPVASGWPTCLKAVAAVALLLKDADKLTLGQNVTVIASHSLESIVRQPPDRWMTNARMTHYQSLLLNERVSFAPPAVLNPATLLPVESEATPVHRCSEILAEETGTRRDLKDQPLPGVPAWYTDGSSFIAEGKRRAGAAIVDGKRTVWASSLPEGTSAQKAELVALTQALRLAEGKDINIYTDSRYAFATAHIHGAIYKQRGWLTSAGKDIKNKEEILALLEAIHLPKRVAIIHCPGHQKGNDPVATGNRRADEAAKQAALSTRVLAETTKPAGKRTADGSEFEKRTADGSEFESPKKKAKVE

SEQ ID NO: 7545 - protein, 2094 aa, synthetic construct
MPAAKRVKLDGGDKKYSIGLDIGTNSVGWAVITDEYKVPSKKFKVLGNTDRHSIKKNLIGALLFDSGETAEATRLKRTARRRYTRRKNRICYLQEIFSNEMAKVDDSFFHRLEESFLVEEDKKHERHPIFGNIVDEVAYHEKYPTIYHLRKKLVDSTDKADLRLIYLALAHMIKFRGHFLIEGDLNPDNSDVDKLFIQLVQTYNQLFEENPINASGVDAKAILSARLSKSRRLENLIAQLPGEKKNGLFGNLIALSLGLTPNFKSNFDLAEDAKLQLSKDTYDDDLDNLLAQIGDQYADLFLAAKNLSDAILLSDILRVNTEITKAPLSASMIKRYDEHHQDLTLLKALVRQQLPEKYKEIFFDQSKNGYAGYIDGGASQEEFYKFIKPILEKMDGTEELLVKLNREDLLRKQRTFDNGSIPHQIHLGELHAILRRQEDFYPFLKDNREKIEKILTFRIPYYVGPLARGNSRFAWMTRKSEETITPWNFEEVVDKGASAQSFIERMTNFDKNLPNEKVLPKHSLLYEYFTVYNELTKVKYVTEGMRKPAFLSGEQKKAIVDLLFKTNRKVTVKQLKEDYFKKIECFDSVEISGVEDRFNASLGTYHDLLKIIKDKDFLDNEENEDILEDIVLTLTLFEDREMIEERLKTYAHLFDDKVMKQLKRRRYTGWGRLSRKLINGIRDKQSGKTILDFLKSDGFANRNFMQLIHDDSLTFKEDIQKAQVSGQGDSLHEHIANLAGSPAIKKGILQTVKVVDELVKVMGRHKPENIVIEMARENQTTQKGQKNSRERMKRIEEGIKELGSQILKEHPVENTQLQNEKLYLYYLQNGRDMYVDQELDINRLSDYDVDHIVPQSFLKDDSIDNKVLTRSDKARGKSDNVPSEEVVKKMKNYWRQLLNAKLITQRKFDNLTKAERGGLSELDKAGFIKRQLVETRQITKHVAQILDSRMNTKYDENDKLIREVKVITLKSKLVSDFRKDFQFYKVREINNYHHAHDAYLNAVVGTALIKKYPKLESEFVYGDYKVYDVRKMIAKSEQEIGKATAKYFFYSNIMNFFKTEITLANGEIRKRPLIETNGETGEIVWDKGRDFATVRKVLSMPQVNIVKKTEVQTGGFSKESILPKRNSDKLIARKKDWDPKKYGGFDSPTVAYSVLVVAKVEKGKSKKLKSVKELLGITIMERSSFEKNPIDFLEAKGYKEVKKDLIIKLPKYSLFELENGRKRMLASAGELQKGNELALPSKYVNFLYLASHYEKLKGSPEDNEQKQLFVEQHKHYLDEIIEQISEFSKRVILADANLDKVLSAYNKHRDKPIREQAENIIHLFTLTNLGAPAAFKYFDTTIDRKRYTSTKEVLDATLIHQSITGLYETRIDLSQLGGDGGPAPGGGEAAAKGGVLNLEEEYRLHEKPVPSSIDPSWLQLFPTVWAERAGMGLANQVPPVVVELRSGASPVAVRQYPMSKEAREGIRPHIQRFLDLGVLVPCQSPWNTPLLPVKKPGTNDYRPVQDLREINKRVQDIHPTVPNPYNLLSSLPPSHTWYSVLDLKDAFFCLKLHPNSQPLFAFEWRDPEKGNTGQLTWTRLPQGFKNSPTLFNEALHRDLAPFRALNPQVVLLQYVDDLLVAAPTYRDCKEGTQKLLQELSKLGYRVSAKKAQLCQKEVTYLGYLLKEGKRWLTPARKATVMKIPPPTTPRQVREFLGKAGFCRLFIPGFASLAAPLYPLTKPSIPFIWTEEHQKAFDRIKEALLSAPALALPDLTKPFTLYVDERAGVARGVLTQTLGPWRRPVAYLSKKLDPVASGWPTCLKAVAAVALLLKDADKLTLGQNVTVIASHSLESIVRQPPDRWMTNARMTHYQSLLLNERVSFAPPAVLNPATLLPVESEATPVHRCSEILAEETGTRRDLKDQPLPGVPAWYTDGSSFIAEGKRRAGAAIVDGKRTVWASSLPEGTSAQKAELVALTQALRLAEGKDINIYTDSRYAFATAHIHGAIYKQRGWLTSAGKDIKNKEEILALLEAIHLPKRVAIIHCPGHQKGNDPVATGNRRADEAAKQAALSTRVLAETTKPAGKRTADGSEFEKRTADGSEFESPKKKAKVE

SEQ ID NO: 7546 - protein, 2096 aa, synthetic construct
MPAAKRVKLDGGDKKYSIGLDIGTNSVGWAVITDEYKVPSKKFKVLGNTDRHSIKKNLIGALLFDSGETAEATRLKRTARRRYTRRKNRICYLQEIFSNEMAKVDDSFFHRLEESFLVEEDKKHERHPIFGNIVDEVAYHEKYPTIYHLRKKLVDSTDKADLRLIYLALAHMIKFRGHFLIEGDLNPDNSDVDKLFIQLVQTYNQLFEENPINASGVDAKAILSARLSKSRRLENLIAQLPGEKKNGLFGNLIALSLGLTPNFKSNFDLAEDAKLQLSKDTYDDDLDNLLAQIGDQYADLFLAAKNLSDAILLSDILRVNTEITKAPLSASMIKRYDEHHQDLTLLKALVRQQLPEKYKEIFFDQSKNGYAGYIDGGASQEEFYKFIKPILEKMDGTEELLVKLNREDLLRKQRTFDNGSIPHQIHLGELHAILRRQEDFYPFLKDNREKIEKILTFRIPYYVGPLARGNSRFAWMTRKSEETITPWNFEEVVDKGASAQSFIERMTNFDKNLPNEKVLPKHSLLYEYFTVYNELTKVKYVTEGMRKPAFLSGEQKKAIVDLLFKTNRKVTVKQLKEDYFKKIECFDSVEISGVEDRFNASLGTYHDLLKIIKDKDFLDNEENEDILEDIVLTLTLFEDREMIEERLKTYAHLFDDKVMKQLKRRRYTGWGRLSRKLINGIRDKQSGKTILDFLKSDGFANRNFMQLIHDDSLTFKEDIQKAQVSGQGDSLHEHIANLAGSPAIKKGILQTVKVVDELVKVMGRHKPENIVIEMARENQTTQKGQKNSRERMKRIEEGIKELGSQILKEHPVENTQLQNEKLYLYYLQNGRDMYVDQELDINRLSDYDVDHIVPQSFLKDDSIDNKVLTRSDKARGKSDNVPSEEVVKKMKNYWRQLLNAKLITQRKFDNLTKAERGGLSELDKAGFIKRQLVETRQITKHVAQILDSRMNTKYDENDKLIREVKVITLKSKLVSDFRKDFQFYKVREINNYHHAHDAYLNAVVGTALIKKYPKLESEFVYGDYKVYDVRKMIAKSEQEIGKATAKYFFYSNIMNFFKTEITLANGEIRKRPLIETNGETGEIVWDKGRDFATVRKVLSMPQVNIVKKTEVQTGGFSKESILPKRNSDKLIARKKDWDPKKYGGFDSPTVAYSVLVVAKVEKGKSKKLKSVKELLGITIMERSSFEKNPIDFLEAKGYKEVKKDLIIKLPKYSLFELENGRKRMLASAGELQKGNELALPSKYVNFLYLASHYEKLKGSPEDNEQKQLFVEQHKHYLDEIIEQISEFSKRVILADANLDKVLSAYNKHRDKPIREQAENIIHLFTLTNLGAPAAFKYFDTTIDRKRYTSTKEVLDATLIHQSITGLYETRIDLSQLGGDGGPAPGGGEAAAKGGTLNIEDEYRLHETSKEPDVPLGSTWLSDFPQAWAETGGMGLAVRQAPLIIPLKATSTPVSIKQYPMSQEARLGIKPHIQRLLDQGILVPCQSPWNTPLLPVKKPGTNDYRPVQDLREVNKRVEDIHPTVPNPYNLLSGLPPSHQWYTVLDLKDAFFCLRLHPTSQPLFAFEWRDPEMGISGQLTWTRLPQGFKNSPTLFNEALHRDLADFRIQHPDLILLQYVDDLLLAATSEQDCQRGTRALLQTLGNLGYRASAKKAQICQKQVKYLGYLLKEGQRWLTEARKETVMGQPTPKTPRQLREFLGTAGFCRLWIPGFAEMAAPLYPLTKPGTLFNWGPDQQKAYQEIKQALLTAPALGLPDLTKPFELFVDEKQGYAKGVLTQKLGPWRRPVAYLSKKLDPVAAGWPPCLRMVAAIAVLTKDAGKLTMGQPLVILAPHAVEALVKQPPDRWLSNARMTHYQAMLLDTDRVQFGPVVALNPATLLPLPEKEAPHDCLEILAETHGTRPDLTDQPIPDADYTWYTDGSSFLQEGQRRAGAAVTTETEVIWARALPAGTSAQRAELIALTQALKMAEGKKLNVYTDSRYAFATAHVHGEIYRRRGWLTSEGREIKNKNEILALLKALFLPKRLSIIHCPGHQKGNSAEARGNRMADQAAREAAMKAVLETSTLLAGKRTADGSEFEKRTADGSEFESPKKKAKVE

SEQ ID NO: 7547 - protein, 2096 aa, synthetic construct
MPAAKRVKLDGGDKKYSIGLDIGTNSVGWAVITDEYKVPSKKFKVLGNTDRHSIKKNLIGALLFDSGETAEATRLKRTARRRYTRRKNRICYLQEIFSNEMAKVDDSFFHRLEESFLVEEDKKHERHPIFGNIVDEVAYHEKYPTIYHLRKKLVDSTDKADLRLIYLALAHMIKFRGHFLIEGDLNPDNSDVDKLFIQLVQTYNQLFEENPINASGVDAKAILSARLSKSRRLENLIAQLPGEKKNGLFGNLIALSLGLTPNFKSNFDLAEDAKLQLSKDTYDDDLDNLLAQIGDQYADLFLAAKNLSDAILLSDILRVNTEITKAPLSASMIKRYDEHHQDLTLLKALVRQQLPEKYKEIFFDQSKNGYAGYIDGGASQEEFYKFIKPILEKMDGTEELLVKLNREDLLRKQRTFDNGSIPHQIHLGELHAILRRQEDFYPFLKDNREKIEKILTFRIPYYVGPLARGNSRFAWMTRKSEETITPWNFEEVVDKGASAQSFIERMTNFDKNLPNEKVLPKHSLLYEYFTVYNELTKVKYVTEGMRKPAFLSGEQKKAIVDLLFKTNRKVTVKQLKEDYFKKIECFDSVEISGVEDRFNASLGTYHDLLKIIKDKDFLDNEENEDILEDIVLTLTLFEDREMIEERLKTYAHLFDDKVMKQLKRRRYTGWGRLSRKLINGIRDKQSGKTILDFLKSDGFANRNFMQLIHDDSLTFKEDIQKAQVSGQGDSLHEHIANLAGSPAIKKGILQTVKVVDELVKVMGRHKPENIVIEMARENQTTQKGQKNSRERMKRIEEGIKELGSQILKEHPVENTQLQNEKLYLYYLQNGRDMYVDQELDINRLSDYDVDHIVPQSFLKDDSIDNKVLTRSDKARGKSDNVPSEEVVKKMKNYWRQLLNAKLITQRKFDNLTKAERGGLSELDKAGFIKRQLVETRQITKHVAQILDSRMNTKYDENDKLIREVKVITLKSKLVSDFRKDFQFYKVREINNYHHAHDAYLNAVVGTALIKKYPKLESEFVYGDYKVYDVRKMIAKSEQEIGKATAKYFFYSNIMNFFKTEITLANGEIRKRPLIETNGETGEIVWDKGRDFATVRKVLSMPQVNIVKKTEVQTGGFSKESILPKRNSDKLIARKKDWDPKKYGGFDSPTVAYSVLVVAKVEKGKSKKLKSVKELLGITIMERSSFEKNPIDFLEAKGYKEVKKDLIIKLPKYSLFELENGRKRMLASAGELQKGNELALPSKYVNFLYLASHYEKLKGSPEDNEQKQLFVEQHKHYLDEIIEQISEFSKRVILADANLDKVLSAYNKHRDKPIREQAENIIHLFTLTNLGAPAAFKYFDTTIDRKRYTSTKEVLDATLIHQSITGLYETRIDLSQLGGDGGPAPGGGEAAAKGGTLNIEDEYRLHETSKEPDVPLGSTWLSDFPQAWAETGGMGLAVRQAPLIIPLKATSTPVSIKQYPMSQEARLGIKPHIQRLLDQGILVPCQSPWNTPLLPVKKPGTNDYRPVQDLREVNKRVEDIHPTVPNPYNLLSGLPPSHQWYTVLDLKDAFFCLRLHPTSQPLFAFEWRDPEMGISGQLTWTRLPQGFKNSPTLFNEALHRDLADFRIQHPDLILLQYVDDLLLAATSEQDCQRGTRALLQTLGNLGYRASAKKAQICQKQVKYLGYLLKEGQRWLTEARKETVMGQPTPKTPRQLREFLGKAGFCRLFIPGFAEMAAPLYPLTKPGTLFNWGPDQQKAYQEIKQALLTAPALGLPDLTKPFELFVDEKQGYAKGVLTQKLGPWRRPVAYLSKKLDPVAAGWPPCLRMVAAIAVLTKDAGKLTMGQPLVILAPHAVEALVKQPPDRWLSNARMTHYQAMLLDTDRVQFGPVVALNPATLLPLPEKEAPHDCLEILAETHGTRPDLTDQPIPDADYTWYTDGSSFLQEGQRRAGAAVTTETEVIWARALPAGTSAQRAELIALTQALKMAEGKKLNVYTDSRYAFATAHVHGEIYRRRGWLTSEGREIKNKNEILALLKALFLPKRLSIIHCPGHQKGNSAEARGNRMADQAAREAAMKAVLETSTLLAGKRTADGSEFEKRTADGSEFESPKKKAKVE

SEQ ID NO: 7548 - protein, 2173 aa, synthetic construct
MPAAKRVKLDGGDKKYSIGLDIGTNSVGWAVITDEYKVPSKKFKVLGNTDRHSIKKNLIGALLFDSGETAEATRLKRTARRRYTRRKNRICYLQEIFSNEMAKVDDSFFHRLEESFLVEEDKKHERHPIFGNIVDEVAYHEKYPTIYHLRKKLVDSTDKADLRLIYLALAHMIKFRGHFLIEGDLNPDNSDVDKLFIQLVQTYNQLFEENPINASGVDAKAILSARLSKSRRLENLIAQLPGEKKNGLFGNLIALSLGLTPNFKSNFDLAEDAKLQLSKDTYDDDLDNLLAQIGDQYADLFLAAKNLSDAILLSDILRVNTEITKAPLSASMIKRYDEHHQDLTLLKALVRQQLPEKYKEIFFDQSKNGYAGYIDGGASQEEFYKFIKPILEKMDGTEELLVKLNREDLLRKQRTFDNGSIPHQIHLGELHAILRRQEDFYPFLKDNREKIEKILTFRIPYYVGPLARGNSRFAWMTRKSEETITPWNFEEVVDKGASAQSFIERMTNFDKNLPNEKVLPKHSLLYEYFTVYNELTKVKYVTEGMRKPAFLSGEQKKAIVDLLFKTNRKVTVKQLKEDYFKKIECFDSVEISGVEDRFNASLGTYHDLLKIIKDKDFLDNEENEDILEDIVLTLTLFEDREMIEERLKTYAHLFDDKVMKQLKRRRYTGWGRLSRKLINGIRDKQSGKTILDFLKSDGFANRNFMQLIHDDSLTFKEDIQKAQVSGQGDSLHEHIANLAGSPAIKKGILQTVKVVDELVKVMGRHKPENIVIEMARENQTTQKGQKNSRERMKRIEEGIKELGSQILKEHPVENTQLQNEKLYLYYLQNGRDMYVDQELDINRLSDYDVDHIVPQSFLKDDSIDNKVLTRSDKARGKSDNVPSEEVVKKMKNYWRQLLNAKLITQRKFDNLTKAERGGLSELDKAGFIKRQLVETRQITKHVAQILDSRMNTKYDENDKLIREVKVITLKSKLVSDFRKDFQFYKVREINNYHHAHDAYLNAVVGTALIKKYPKLESEFVYGDYKVYDVRKMIAKSEQEIGKATAKYFFYSNIMNFFKTEITLANGEIRKRPLIETNGETGEIVWDKGRDFATVRKVLSMPQVNIVKKTEVQTGGFSKESILPKRNSDKLIARKKDWDPKKYGGFDSPTVAYSVLVVAKVEKGKSKKLKSVKELLGITIMERSSFEKNPIDFLEAKGYKEVKKDLIIKLPKYSLFELENGRKRMLASAGELQKGNELALPSKYVNFLYLASHYEKLKGSPEDNEQKQLFVEQHKHYLDEIIEQISEFSKRVILADANLDKVLSAYNKHRDKPIREQAENIIHLFTLTNLGAPAAFKYFDTTIDRKRYTSTKEVLDATLIHQSITGLYETRIDLSQLGGDGGPAPEAAAKGGGGGMDLLKPLTVERKGVKIKGYWNSQADITCVPKDLLQGEEPVRQQNVTTIHGTQEGDVYYVNLKIDGRRINTEVIGTTLDYAIITPGDVPWILKKPLELTIKLDLEEQQGTLLNNSILSKKGKEELKQLFEKYSALWQSWENQVGHRRIRPHKIATGTVKPTPQKQYHINPKAKPDIQIVINDLLKQGVLIQKESTMNTPVYPVPKPNGRWRMVLDYRAVNKVTPLIAVQNQHSYGILGSLFKGRYKTTIDLSNGFWAHPIVPEDYWITAFTWQGKQYCWTVLPQGFLNSPGLFTGDVVDLLQGIPNVEVYVDDVYISHDSEKEHLEYLDILFNRLKEAGYIISLKKSNIANSIVDFLGFQITNEGRGLTDTFKEKLENITAPTTLKQLQSILGLLNFARNFIPDFTELIAPLYALIPKSTKNYVPWQIEHSTTLETLITKLNGAEYLQGRKGDKTLIMKVNASYTTGYIRYYNEGEKKPISYVSIVFSKTELKFTELEKLLTTVHKGLLKALDLSMGQNIHVYSPIVSMQNIQKTPQTAKKALASRWLSWLSYLEDPRIRFFYDPQMPALKDLPAVDTGKDNKKHPSNFQHIFYTDGSAITSPTKEGHLNAGMGIVYFINKDGNLQKQQEWSISLGNHTAQFAEIAAFEFALKKCLPLGGNILVVTDSNYVAKAYNEELDVWASNGFVNNRKKPLKHISKWKSVADLKRLRPDVVVTHEPGHQKLDSSPHAYGNNLADQLATQASFKVHAGKRTADGSEFEKRTADGSEFESPKKKAKVE

SEQ ID NO: 7549 - protein, 2087 aa, synthetic construct
MPAAKRVKLDGGDKKYSIGLDIGTNSVGWAVITDEYKVPSKKFKVLGNTDRHSIKKNLIGALLFDSGETAEATRLKRTARRRYTRRKNRICYLQEIFSNEMAKVDDSFFHRLEESFLVEEDKKHERHPIFGNIVDEVAYHEKYPTIYHLRKKLVDSTDKADLRLIYLALAHMIKFRGHFLIEGDLNPDNSDVDKLFIQLVQTYNQLFEENPINASGVDAKAILSARLSKSRRLENLIAQLPGEKKNGLFGNLIALSLGLTPNFKSNFDLAEDAKLQLSKDTYDDDLDNLLAQIGDQYADLFLAAKNLSDAILLSDILRVNTEITKAPLSASMIKRYDEHHQDLTLLKALVRQQLPEKYKEIFFDQSKNGYAGYIDGGASQEEFYKFIKPILEKMDGTEELLVKLNREDLLRKQRTFDNGSIPHQIHLGELHAILRRQEDFYPFLKDNREKIEKILTFRIPYYVGPLARGNSRFAWMTRKSEETITPWNFEEVVDKGASAQSFIERMTNFDKNLPNEKVLPKHSLLYEYFTVYNELTKVKYVTEGMRKPAFLSGEQKKAIVDLLFKTNRKVTVKQLKEDYFKKIECFDSVEISGVEDRFNASLGTYHDLLKIIKDKDFLDNEENEDILEDIVLTLTLFEDREMIEERLKTYAHLFDDKVMKQLKRRRYTGWGRLSRKLINGIRDKQSGKTILDFLKSDGFANRNFMQLIHDDSLTFKEDIQKAQVSGQGDSLHEHIANLAGSPAIKKGILQTVKVVDELVKVMGRHKPENIVIEMARENQTTQKGQKNSRERMKRIEEGIKELGSQILKEHPVENTQLQNEKLYLYYLQNGRDMYVDQELDINRLSDYDVDHIVPQSFLKDDSIDNKVLTRSDKARGKSDNVPSEEVVKKMKNYWRQLLNAKLITQRKFDNLTKAERGGLSELDKAGFIKRQLVETRQITKHVAQILDSRMNTKYDENDKLIREVKVITLKSKLVSDFRKDFQFYKVREINNYHHAHDAYLNAVVGTALIKKYPKLESEFVYGDYKVYDVRKMIAKSEQEIGKATAKYFFYSNIMNFFKTEITLANGEIRKRPLIETNGETGEIVWDKGRDFATVRKVLSMPQVNIVKKTEVQTGGFSKESILPKRNSDKLIARKKDWDPKKYGGFDSPTVAYSVLVVAKVEKGKSKKLKSVKELLGITIMERSSFEKNPIDFLEAKGYKEVKKDLIIKLPKYSLFELENGRKRMLASAGELQKGNELALPSKYVNFLYLASHYEKLKGSPEDNEQKQLFVEQHKHYLDEIIEQISEFSKRVILADANLDKVLSAYNKHRDKPIREQAENIIHLFTLTNLGAPAAFKYFDTTIDRKRYTSTKEVLDATLIHQSITGLYETRIDLSQLGGDGGPAPEAAAKGGGGGVPWILKKPLELTIKLDLEEQQGTLLNNSILSKKGKEELKQLFEKYSALWQSWENQVGHRRIRPHKIATGTVKPTPQKQYHINPKAKPDIQIVINDLLKQGVLIQKESTMNTPVYPVPKPNGRWRMVLDYRAVNKVTPLIAVQNQHSYGILGSLFKGRYKTTIDLSNGFWAHPIVPEDYWITAFTWQGKQYCWTVLPQGFLNSPGLFTGDVVDLLQGIPNVEVYVDDVYISHDSEKEHLEYLDILFNRLKEAGYIISLKKSNIANSIVDFLGFQITNEGRGLTDTFKEKLENITAPTTLKQLQSILGLLNFARNFIPDFTELIAPLYALIPKSTKNYVPWQIEHSTTLETLITKLNGAEYLQGRKGDKTLIMKVNASYTTGYIRYYNEGEKKPISYVSIVFSKTELKFTELEKLLTTVHKGLLKALDLSMGQNIHVYSPIVSMQNIQKTPQTAKKALASRWLSWLSYLEDPRIRFFYDPQMPALKDLPAVDTGKDNKKHPSNFQHIFYTDGSAITSPTKEGHLNAGMGIVYFINKDGNLQKQQEWSISLGNHTAQFAEIAAFEFALKKCLPLGGNILVVTDSNYVAKAYNEELDVWASNGFVNNRKKPLKHISKWKSVADLKRLRPDVVVTHEPGHQKLDSSPHAYGNNLADQLATQASFKVHAGKRTADGSEFEKRTADGSEFESPKKKAKVE

SEQ ID NO: 7550 - protein, 2095 aa, synthetic construct
MPAAKRVKLDGGDKKYSIGLDIGTNSVGWAVITDEYKVPSKKFKVLGNTDRHSIKKNLIGALLFDSGETAEATRLKRTARRRYTRRKNRICYLQEIFSNEMAKVDDSFFHRLEESFLVEEDKKHERHPIFGNIVDEVAYHEKYPTIYHLRKKLVDSTDKADLRLIYLALAHMIKFRGHFLIEGDLNPDNSDVDKLFIQLVQTYNQLFEENPINASGVDAKAILSARLSKSRRLENLIAQLPGEKKNGLFGNLIALSLGLTPNFKSNFDLAEDAKLQLSKDTYDDDLDNLLAQIGDQYADLFLAAKNLSDAILLSDILRVNTEITKAPLSASMIKRYDEHHQDLTLLKALVRQQLPEKYKEIFFDQSKNGYAGYIDGGASQEEFYKFIKPILEKMDGTEELLVKLNREDLLRKQRTFDNGSIPHQIHLGELHAILRRQEDFYPFLKDNREKIEKILTFRIPYYVGPLARGNSRFAWMTRKSEETITPWNFEEVVDKGASAQSFIERMTNFDKNLPNEKVLPKHSLLYEYFTVYNELTKVKYVTEGMRKPAFLSGEQKKAIVDLLFKTNRKVTVKQLKEDYFKKIECFDSVEISGVEDRFNASLGTYHDLLKIIKDKDFLDNEENEDILEDIVLTLTLFEDREMIEERLKTYAHLFDDKVMKQLKRRRYTGWGRLSRKLINGIRDKQSGKTILDFLKSDGFANRNFMQLIHDDSLTFKEDIQKAQVSGQGDSLHEHIANLAGSPAIKKGILQTVKVVDELVKVMGRHKPENIVIEMARENQTTQKGQKNSRERMKRIEEGIKELGSQILKEHPVENTQLQNEKLYLYYLQNGRDMYVDQELDINRLSDYDVDHIVPQSFLKDDSIDNKVLTRSDKARGKSDNVPSEEVVKKMKNYWRQLLNAKLITQRKFDNLTKAERGGLSELDKAGFIKRQLVETRQITKHVAQILDSRMNTKYDENDKLIREVKVITLKSKLVSDFRKDFQFYKVREINNYHHAHDAYLNAVVGTALIKKYPKLESEFVYGDYKVYDVRKMIAKSEQEIGKATAKYFFYSNIMNFFKTEITLANGEIRKRPLIETNGETGEIVWDKGRDFATVRKVLSMPQVNIVKKTEVQTGGFSKESILPKRNSDKLIARKKDWDPKKYGGFDSPTVAYSVLVVAKVEKGKSKKLKSVKELLGITIMERSSFEKNPIDFLEAKGYKEVKKDLIIKLPKYSLFELENGRKRMLASAGELQKGNELALPSKYVNFLYLASHYEKLKGSPEDNEQKQLFVEQHKHYLDEIIEQISEFSKRVILADANLDKVLSAYNKHRDKPIREQAENIIHLFTLTNLGAPAAFKYFDTTIDRKRYTSTKEVLDATLIHQSITGLYETRIDLSQLGGDGGPAPEAAAKGGGGGTLQLEEEYRLFEPESTQKQEMDIWLKNFPQAWAETGGMGTAHCQAPVLIQLKATATPISIRQYPMPHEAYQGIKPHIRRMLDQGILKPCQSPWNTPLLPVKKPGTEDYRPVQDLREVNKRVEDIHPTVPNPYNLLSTLPPSHPWYTVLDLKDAFFCLRLHSESQLLFAFEWRDPEIGLSGQLTWTRLPQGFKNSPTLFNEALHSDLADFRVRYPALVLLQYVDDLLLAAATRTECLEGTKALLETLGNKGYRASAKKAQICLQEVTYLGYSLKDGQRWLTKARKEAILSIPVPKNSRQVREFLGTAGYCRLWIPGFAELAAPLYPLTRPGTLFQWGTEQQLAFEDIKKALLSSPALGLPDITKPFELFIDENSGFAKGVLVQKLGPWKRPVAYLSKKLDTVASGWPPCLRMVAAIAILVKDAGKLTLGQPLTILTSHPVEALVRQPPNKWLSNARMTHYQAMLLDAERVHFGPTVSLNPATLLPLPSGGNHHDCLQILAETHGTRPDLTDQPLPDADLTWYTDGSSFIRNGEREAGAAVTTESEVIWAAPLPPGTSAQRAELIALTQALKMAEGKKLTVYTDSRYAFATTHVHGEIYRRRGWLTSEGKEIKNKNEILALLEALFLPKRLSIIHCPGHQKGDSPQAKGNRLADDTAKKAATETHSSLTVLPAGKRTADGSEFEKRTADGSEFESPKKKAKVE

SEQ ID NO: 7551 - protein, 2087 aa, synthetic construct
MPAAKRVKLDGGDKKYSIGLDIGTNSVGWAVITDEYKVPSKKFKVLGNTDRHSIKKNLIGALLFDSGETAEATRLKRTARRRYTRRKNRICYLQEIFSNEMAKVDDSFFHRLEESFLVEEDKKHERHPIFGNIVDEVAYHEKYPTIYHLRKKLVDSTDKADLRLIYLALAHMIKFRGHFLIEGDLNPDNSDVDKLFIQLVQTYNQLFEENPINASGVDAKAILSARLSKSRRLENLIAQLPGEKKNGLFGNLIALSLGLTPNFKSNFDLAEDAKLQLSKDTYDDDLDNLLAQIGDQYADLFLAAKNLSDAILLSDILRVNTEITKAPLSASMIKRYDEHHQDLTLLKALVRQQLPEKYKEIFFDQSKNGYAGYIDGGASQEEFYKFIKPILEKMDGTEELLVKLNREDLLRKQRTFDNGSIPHQIHLGELHAILRRQEDFYPFLKDNREKIEKILTFRIPYYVGPLARGNSRFAWMTRKSEETITPWNFEEVVDKGASAQSFIERMTNFDKNLPNEKVLPKHSLLYEYFTVYNELTKVKYVTEGMRKPAFLSGEQKKAIVDLLFKTNRKVTVKQLKEDYFKKIECFDSVEISGVEDRFNASLGTYHDLLKIIKDKDFLDNEENEDILEDIVLTLTLFEDREMIEERLKTYAHLFDDKVMKQLKRRRYTGWGRLSRKLINGIRDKQSGKTILDFLKSDGFANRNFMQLIHDDSLTFKEDIQKAQVSGQGDSLHEHIANLAGSPAIKKGILQTVKVVDELVKVMGRHKPENIVIEMARENQTTQKGQKNSRERMKRIEEGIKELGSQILKEHPVENTQLQNEKLYLYYLQNGRDMYVDQELDINRLSDYDVDHIVPQSFLKDDSIDNKVLTRSDKARGKSDNVPSEEVVKKMKNYWRQLLNAKLITQRKFDNLTKAERGGLSELDKAGFIKRQLVETRQITKHVAQILDSRMNTKYDENDKLIREVKVITLKSKLVSDFRKDFQFYKVREINNYHHAHDAYLNAVVGTALIKKYPKLESEFVYGDYKVYDVRKMIAKSEQEIGKATAKYFFYSNIMNFFKTEITLANGEIRKRPLIETNGETGEIVWDKGRDFATVRKVLSMPQVNIVKKTEVQTGGFSKESILPKRNSDKLIARKKDWDPKKYGGFDSPTVAYSVLVVAKVEKGKSKKLKSVKELLGITIMERSSFEKNPIDFLEAKGYKEVKKDLIIKLPKYSLFELENGRKRMLASAGELQKGNELALPSKYVNFLYLASHYEKLKGSPEDNEQKQLFVEQHKHYLDEIIEQISEFSKRVILADANLDKVLSAYNKHRDKPIREQAENIIHLFTLTNLGAPAAFKYFDTTIDRKRYTSTKEVLDATLIHQSITGLYETRIDLSQLGGDGGPAPEAAAKGGGGGVPWLTQQPLQLTILVPLQEYQEKILSKTALPEDQKQQLKTLFVKYDNLWQHWENQVGHRKIRPHNIATGDYPPRPQKQYPINPKAKPSIQIVIDDLLKQGVLTPQNSTMNTPVYPVPKPDGRWRMVLDYREVNKTIPLTAAQNQHSAGILATIVRQKYKTTLDLANGFWAHPITPESYWLTAFTWQGKQYCWTRLPQGFLNSPALFNADVVDLLKEIPNVQVYVDDIYLSHDDPKEHVQQLEKVFQILLQAGYVVSLKKSEIGQKTVEFLGFNITKEGRGLTDTFKTKLLNITPPKDLKQLQSILGKLNFARNFIPNFAELVQPLYNLIAPAKGKYIEWSEENTKQLNMVIEALNTASNLEERLPEQRLVIKVNTSPSAGYVRYYNETGKKPIMYLNYVFSKAELKFSMLEKLLTTMHKALIKAMDLAMGQEILVYSPIVSMTKIQKTPLPERKALPIRWITWMTYLEDPRIQFHYDKTLPELKHIPDVYTSSQSPVKHPSQYEGVFYTDGSAIKSPDPTKSNNAGMGIVHATYKPEYQVLNQWSIPLGNHTAQMAEIAAVEFACKKALKIPGPVLVITDSFYVAESANKELPYWKSNGFVNNKKKPLKHISKWKSIAECLSMKPDITIQHEKGISLQIPVFILKGNALADKLATQGSYVVNAGKRTADGSEFEKRTADGSEFESPKKKAKVE

SEQ ID NO: 7552 - protein, 2176 aa, synthetic construct
MPAAKRVKLDGGDKKYSIGLDIGTNSVGWAVITDEYKVPSKKFKVLGNTDRHSIKKNLIGALLFDSGETAEATRLKRTARRRYTRRKNRICYLQEIFSNEMAKVDDSFFHRLEESFLVEEDKKHERHPIFGNIVDEVAYHEKYPTIYHLRKKLVDSTDKADLRLIYLALAHMIKFRGHFLIEGDLNPDNSDVDKLFIQLVQTYNQLFEENPINASGVDAKAILSARLSKSRRLENLIAQLPGEKKNGLFGNLIALSLGLTPNFKSNFDLAEDAKLQLSKDTYDDDLDNLLAQIGDQYADLFLAAKNLSDAILLSDILRVNTEITKAPLSASMIKRYDEHHQDLTLLKALVRQQLPEKYKEIFFDQSKNGYAGYIDGGASQEEFYKFIKPILEKMDGTEELLVKLNREDLLRKQRTFDNGSIPHQIHLGELHAILRRQEDFYPFLKDNREKIEKILTFRIPYYVGPLARGNSRFAWMTRKSEETITPWNFEEVVDKGASAQSFIERMTNFDKNLPNEKVLPKHSLLYEYFTVYNELTKVKYVTEGMRKPAFLSGEQKKAIVDLLFKTNRKVTVKQLKEDYFKKIECFDSVEISGVEDRFNASLGTYHDLLKIIKDKDFLDNEENEDILEDIVLTLTLFEDREMIEERLKTYAHLFDDKVMKQLKRRRYTGWGRLSRKLINGIRDKQSGKTILDFLKSDGFANRNFMQLIHDDSLTFKEDIQKAQVSGQGDSLHEHIANLAGSPAIKKGILQTVKVVDELVKVMGRHKPENIVIEMARENQTTQKGQKNSRERMKRIEEGIKELGSQILKEHPVENTQLQNEKLYLYYLQNGRDMYVDQELDINRLSDYDVDHIVPQSFLKDDSIDNKVLTRSDKARGKSDNVPSEEVVKKMKNYWRQLLNAKLITQRKFDNLTKAERGGLSELDKAGFIKRQLVETRQITKHVAQILDSRMNTKYDENDKLIREVKVITLKSKLVSDFRKDFQFYKVREINNYHHAHDAYLNAVVGTALIKKYPKLESEFVYGDYKVYDVRKMIAKSEQEIGKATAKYFFYSNIMNFFKTEITLANGEIRKRPLIETNGETGEIVWDKGRDFATVRKVLSMPQVNIVKKTEVQTGGFSKESILPKRNSDKLIARKKDWDPKKYGGFDSPTVAYSVLVVAKVEKGKSKKLKSVKELLGITIMERSSFEKNPIDFLEAKGYKEVKKDLIIKLPKYSLFELENGRKRMLASAGELQKGNELALPSKYVNFLYLASHYEKLKGSPEDNEQKQLFVEQHKHYLDEIIEQISEFSKRVILADANLDKVLSAYNKHRDKPIREQAENIIHLFTLTNLGAPAAFKYFDTTIDRKRYTSTKEVLDATLIHQSITGLYETRIDLSQLGGDGGPAPEAAAKGGGGGMNPLQLLQPLPAEIKGTKLLAHWNSGATITCIPESFLEDEQPIKKTLIKTIHGEKQQNVYYVTFKVKGRKVEAEVIASPYEYILLSPTDVPWLTQQPLQLTILVPLQEYQEKILSKTALPEDQKQQLKTLFVKYDNLWQHWENQVGHRKIRPHNIATGDYPPRPQKQYPINPKAKPSIQIVIDDLLKQGVLTPQNSTMNTPVYPVPKPDGRWRMVLDYREVNKTIPLTAAQNQHSAGILATIVRQKYKTTLDLANGFWAHPITPESYWLTAFTWQGKQYCWTRLPQGFLNSPALFNADVVDLLKEIPNVQVYVDDIYLSHDDPKEHVQQLEKVFQILLQAGYVVSLKKSEIGQKTVEFLGFNITKEGRGLTDTFKTKLLNITPPKDLKQLQSILGLLNFARNFIPNFAELVQPLYNLIAPAKGKYIEWSEENTKQLNMVIEALNTASNLEERLPEQRLVIKVNTSPSAGYVRYYNETGKKPIMYLNYVFSKAELKFSMLEKLLTTMHKALIKAMDLAMGQEILVYSPIVSMTKIQKTPLPERKALPIRWITWMTYLEDPRIQFHYDKTLPELKHIPDVYTSSQSPVKHPSQYEGVFYTDGSAIKSPDPTKSNNAGMGIVHATYKPEYQVLNQWSIPLGNHTAQMAEIAAVEFACKKALKIPGPVLVITDSFYVAESANKELPYWKSNGFVNNKKKPLKHISKWKSIAECLSMKPDITIQHEKGISLQIPVFILKGNALADKLATQGSYVVNAGKRTADGSEFEKRTADGSEFESPKKKAKVE

SEQ ID NO: 7553 - protein, 2176 aa, synthetic construct
MPAAKRVKLDGGDKKYSIGLDIGTNSVGWAVITDEYKVPSKKFKVLGNTDRHSIKKNLIGALLFDSGETAEATRLKRTARRRYTRRKNRICYLQEIFSNEMAKVDDSFFHRLEESFLVEEDKKHERHPIFGNIVDEVAYHEKYPTIYHLRKKLVDSTDKADLRLIYLALAHMIKFRGHFLIEGDLNPDNSDVDKLFIQLVQTYNQLFEENPINASGVDAKAILSARLSKSRRLENLIAQLPGEKKNGLFGNLIALSLGLTPNFKSNFDLAEDAKLQLSKDTYDDDLDNLLAQIGDQYADLFLAAKNLSDAILLSDILRVNTEITKAPLSASMIKRYDEHHQDLTLLKALVRQQLPEKYKEIFFDQSKNGYAGYIDGGASQEEFYKFIKPILEKMDGTEELLVKLNREDLLRKQRTFDNGSIPHQIHLGELHAILRRQEDFYPFLKDNREKIEKILTFRIPYYVGPLARGNSRFAWMTRKSEETITPWNFEEVVDKGASAQSFIERMTNFDKNLPNEKVLPKHSLLYEYFTVYNELTKVKYVTEGMRKPAFLSGEQKKAIVDLLFKTNRKVTVKQLKEDYFKKIECFDSVEISGVEDRFNASLGTYHDLLKIIKDKDFLDNEENEDILEDIVLTLTLFEDREMIEERLKTYAHLFDDKVMKQLKRRRYTGWGRLSRKLINGIRDKQSGKTILDFLKSDGFANRNFMQLIHDDSLTFKEDIQKAQVSGQGDSLHEHIANLAGSPAIKKGILQTVKVVDELVKVMGRHKPENIVIEMARENQTTQKGQKNSRERMKRIEEGIKELGSQILKEHPVENTQLQNEKLYLYYLQNGRDMYVDQELDINRLSDYDVDHIVPQSFLKDDSIDNKVLTRSDKARGKSDNVPSEEVVKKMKNYWRQLLNAKLITQRKFDNLTKAERGGLSELDKAGFIKRQLVETRQITKHVAQILDSRMNTKYDENDKLIREVKVITLKSKLVSDFRKDFQFYKVREINNYHHAHDAYLNAVVGTALIKKYPKLESEFVYGDYKVYDVRKMIAKSEQEIGKATAKYFFYSNIMNFFKTEITLANGEIRKRPLIETNGETGEIVWDKGRDFATVRKVLSMPQVNIVKKTEVQTGGFSKESILPKRNSDKLIARKKDWDPKKYGGFDSPTVAYSVLVVAKVEKGKSKKLKSVKELLGITIMERSSFEKNPIDFLEAKGYKEVKKDLIIKLPKYSLFELENGRKRMLASAGELQKGNELALPSKYVNFLYLASHYEKLKGSPEDNEQKQLFVEQHKHYLDEIIEQISEFSKRVILADANLDKVLSAYNKHRDKPIREQAENIIHLFTLTNLGAPAAFKYFDTTIDRKRYTSTKEVLDATLIHQSITGLYETRIDLSQLGGDGGPAPEAAAKGGGGGMNPLQLLQPLPAEIKGTKLLAHWNSGATITCIPESFLEDEQPIKKTLIKTIHGEKQQNVYYVTFKVKGRKVEAEVIASPYEYILLSPTDVPWLTQQPLQLTILVPLQEYQEKILSKTALPEDQKQQLKTLFVKYDNLWQHWENQVGHRKIRPHNIATGDYPPRPQKQYPINPKAKPSIQIVIDDLLKQGVLTPQNSTMNTPVYPVPKPDGRWRMVLDYREVNKTIPLTAAQNQHSAGILATIVRQKYKTTLDLANGFWAHPITPESYWLTAFTWQGKQYCWTRLPQGFLNSPALFNADVVDLLKEIPNVQVYVDDIYLSHDDPKEHVQQLEKVFQILLQAGYVVSLKKSEIGQKTVEFLGFNITKEGRGLTDTFKTKLLNITPPKDLKQLQSILGKLNFARNFIPNFAELVQPLYNLIAPAKGKYIEWSEENTKQLNMVIEALNTASNLEERLPEQRLVIKVNTSPSAGYVRYYNETGKKPIMYLNYVFSKAELKFSMLEKLLTTMHKALIKAMDLAMGQEILVYSPIVSMTKIQKTPLPERKALPIRWITWMTYLEDPRIQFHYDKTLPELKHIPDVYTSSQSPVKHPSQYEGVFYTDGSAIKSPDPTKSNNAGMGIVHATYKPEYQVLNQWSIPLGNHTAQMAEIAAVEFACKKALKIPGPVLVITDSFYVAESANKELPYWKSNGFVNNKKKPLKHISKWKSIAECLSMKPDITIQHEKGISLQIPVFILKGNALADKLATQGSYVVNAGKRTADGSEFEKRTADGSEFESPKKKAKVE

SEQ ID NO: 7554 - protein, 2094 aa, synthetic construct
MPAAKRVKLDGGDKKYSIGLDIGTNSVGWAVITDEYKVPSKKFKVLGNTDRHSIKKNLIGALLFDSGETAEATRLKRTARRRYTRRKNRICYLQEIFSNEMAKVDDSFFHRLEESFLVEEDKKHERHPIFGNIVDEVAYHEKYPTIYHLRKKLVDSTDKADLRLIYLALAHMIKFRGHFLIEGDLNPDNSDVDKLFIQLVQTYNQLFEENPINASGVDAKAILSARLSKSRRLENLIAQLPGEKKNGLFGNLIALSLGLTPNFKSNFDLAEDAKLQLSKDTYDDDLDNLLAQIGDQYADLFLAAKNLSDAILLSDILRVNTEITKAPLSASMIKRYDEHHQDLTLLKALVRQQLPEKYKEIFFDQSKNGYAGYIDGGASQEEFYKFIKPILEKMDGTEELLVKLNREDLLRKQRTFDNGSIPHQIHLGELHAILRRQEDFYPFLKDNREKIEKILTFRIPYYVGPLARGNSRFAWMTRKSEETITPWNFEEVVDKGASAQSFIERMTNFDKNLPNEKVLPKHSLLYEYFTVYNELTKVKYVTEGMRKPAFLSGEQKKAIVDLLFKTNRKVTVKQLKEDYFKKIECFDSVEISGVEDRFNASLGTYHDLLKIIKDKDFLDNEENEDILEDIVLTLTLFEDREMIEERLKTYAHLFDDKVMKQLKRRRYTGWGRLSRKLINGIRDKQSGKTILDFLKSDGFANRNFMQLIHDDSLTFKEDIQKAQVSGQGDSLHEHIANLAGSPAIKKGILQTVKVVDELVKVMGRHKPENIVIEMARENQTTQKGQKNSRERMKRIEEGIKELGSQILKEHPVENTQLQNEKLYLYYLQNGRDMYVDQELDINRLSDYDVDHIVPQSFLKDDSIDNKVLTRSDKARGKSDNVPSEEVVKKMKNYWRQLLNAKLITQRKFDNLTKAERGGLSELDKAGFIKRQLVETRQITKHVAQILDSRMNTKYDENDKLIREVKVITLKSKLVSDFRKDFQFYKVREINNYHHAHDAYLNAVVGTALIKKYPKLESEFVYGDYKVYDVRKMIAKSEQEIGKATAKYFFYSNIMNFFKTEITLANGEIRKRPLIETNGETGEIVWDKGRDFATVRKVLSMPQVNIVKKTEVQTGGFSKESILPKRNSDKLIARKKDWDPKKYGGFDSPTVAYSVLVVAKVEKGKSKKLKSVKELLGITIMERSSFEKNPIDFLEAKGYKEVKKDLIIKLPKYSLFELENGRKRMLASAGELQKGNELALPSKYVNFLYLASHYEKLKGSPEDNEQKQLFVEQHKHYLDEIIEQISEFSKRVILADANLDKVLSAYNKHRDKPIREQAENIIHLFTLTNLGAPAAFKYFDTTIDRKRYTSTKEVLDATLIHQSITGLYETRIDLSQLGGDGGPAPEAAAKGGGGGVLNLEEEYRLHEKPVPSSIDPSWLQLFPTVWAERAGMGLANQVPPVVVELRSGASPVAVRQYPMSKEAREGIRPHIQKFLDLGVLVPCRSPWNTPLLPVKKPGTNDYRPVQDLREINKRVQDIHPTVPNPYNLLSSLPPSYTWYSVLDLKDAFFCLRLHPNSQPLFAFEWKDPEKGNTGQLTWTRLPQGFKNSPTLFNEALHRDLAPFRALNPQVVLLQYVDDLLVAAPTYEDCKKGTQKLLQELSKLGYRVSAKKAQLCQREVTYLGYLLKEGKRWLTPARKATVMKIPVPTTPRQVREFLGKAGFCRLFIPGFASLAAPLYPLTKPSIPFIWTEEHQQAFDHIKKALLSAPALALPDLTKPFTLYIDERAGVARGVLTQTLGPWRRPVAYLSKKLDPVASGWPTCLKAVAAVALLLKDADKLTLGQNVTVIASHSLESIVRQPPDRWMTNARMTHYQSLLLNERVSFAPPAVLNPATLLPVESEATPVHRCSEILAEETGTRRDLEDQPLPGVPTWYTDGSSFITEGKRRAGAPIVDGKRTVWASSLPEGTSAQKAELVALTQALRLAEGKNINIYTDSRYAFATAHIHGAIYKQRGWLTSAGKDIKNKEEILALLEAIHLPRRVAIIHCPGHQRGSNPVATGNRRADEAAKQAALSTRVLAGTTKPAGKRTADGSEFEKRTADGSEFESPKKKAKVE

SEQ ID NO: 7555 - protein, 2127 aa, synthetic construct; identical to SEQ ID NO: 4537

SEQ ID NO: 7556 - protein, 2218 aa, synthetic construct
MPAAKRVKLDGGDKKYSIGLDIGTNSVGWAVITDEYKVPSKKFKVLGNTDRHSIKKNLIGALLFDSGETAEATRLKRTARRRYTRRKNRICYLQEIFSNEMAKVDDSFFHRLEESFLVEEDKKHERHPIFGNIVDEVAYHEKYPTIYHLRKKLVDSTDKADLRLIYLALAHMIKFRGHFLIEGDLNPDNSDVDKLFIQLVQTYNQLFEENPINASGVDAKAILSARLSKSRRLENLIAQLPGEKKNGLFGNLIALSLGLTPNFKSNFDLAEDAKLQLSKDTYDDDLDNLLAQIGDQYADLFLAAKNLSDAILLSDILRVNTEITKAPLSASMIKRYDEHHQDLTLLKALVRQQLPEKYKEIFFDQSKNGYAGYIDGGASQEEFYKFIKPILEKMDGTEELLVKLNREDLLRKQRTFDNGSIPHQIHLGELHAILRRQEDFYPFLKDNREKIEKILTFRIPYYVGPLARGNSRFAWMTRKSEETITPWNFEEVVDKGASAQSFIERMTNFDKNLPNEKVLPKHSLLYEYFTVYNELTKVKYVTEGMRKPAFLSGEQKKAIVDLLFKTNRKVTVKQLKEDYFKKIECFDSVEISGVEDRFNASLGTYHDLLKIIKDKDFLDNEENEDILEDIVLTLTLFEDREMIEERLKTYAHLFDDKVMKQLKRRRYTGWGRLSRKLINGIRDKQSGKTILDFLKSDGFANRNFMQLIHDDSLTFKEDIQKAQVSGQGDSLHEHIANLAGSPAIKKGILQTVKVVDELVKVMGRHKPENIVIEMARENQTTQKGQKNSRERMKRIEEGIKELGSQILKEHPVENTQLQNEKLYLYYLQNGRDMYVDQELDINRLSDYDVDHIVPQSFLKDDSIDNKVLTRSDKARGKSDNVPSEEVVKKMKNYWRQLLNAKLITQRKFDNLTKAERGGLSELDKAGFIKRQLVETRQITKHVAQILDSRMNTKYDENDKLIREVKVITLKSKLVSDFRKDFQFYKVREINNYHHAHDAYLNAVVGTALIKKYPKLESEFVYGDYKVYDVRKMIAKSEQEIGKATAKYFFYSNIMNFFKTEITLANGEIRKRPLIETNGETGEIVWDKGRDFATVRKVLSMPQVNIVKKTEVQTGGFSKESILPKRNSDKLIARKKDWDPKKYGGFDSPTVAYSVLVVAKVEKGKSKKLKSVKELLGITIMERSSFEKNPIDFLEAKGYKEVKKDLIIKLPKYSLFELENGRKRMLASAGELQKGNELALPSKYVNFLYLASHYEKLKGSPEDNEQKQLFVEQHKHYLDEIIEQISEFSKRVILADANLDKVLSAYNKHRDKPIREQAENIIHLFTLTNLGAPAAFKYFDTTIDRKRYTSTKEVLDATLIHQSITGLYETRIDLSQLGGDGGPAPEAAAKGGGGGTLGDQGSRGSDPLPEPRVTLTVEGIPTEFLVNTGAEHSVLTKPMGKMGSKRTVVAGATGSKVYPWTTKRLLKIGQKQVTHSFLVIPECPAPLLGRDLLTKLKAQIQFSTEGPQVTWEDRPAMCLVLNLEEEYRLHEKPVPPSIDPSWLQLFPMVWAEKAGMGLANQVPPVVVELKSDASPVAVRQYPMSKEAREGIRPHIQRFLDLGILVPCQSPWNTPLLPVKKPGTNDYRPVQDLREVNKRVQDIHPTVPNPYNLLSSLPPSHTWYSVLDLKDAFFCLKLHPNSQPLFAFEWRDPEKGNTGQLTWTRLPQGFKNSPTLFNEALHRDLASFRALNPQVVMLQYVDDLLVAAPTYRDCKEGTRRLLQELSKLGYRVSAKKAQLCREEVTYLGYLLKGGKRWLTPARKATVMKIPTPTTPRQVREFLGTAGFCRLWIPGFASLAAPLYPLTRPKVPFTWTEAHQEAFGRIKEALLSAPALALPDLTKPFALYVDEKEGVARGVLTQTLGPWRRPVAYLSKKLDPVASGWPTCLKAIAAVALLLKDADKLTLGQNVLVIAPHNLESIVRQPPDRWMTNARMTHYQSLLLNERVSFAPPAILNPATLLPVESDDTPIHICSEILAEETGTRPDLRDQPLPGVPAWYTDGSSFIMDGRRQAGAAIVDNKRTVWASNLPEGTSAQKAELIALTQALRLAEGKSINIYTDSRYAFATAHVHGAIYKQRGWLTSAGKDIKNKEEILALLEAIHLPKRVAIIHCPGHQRGTDPVATGNRKADEAAKQAAQSTRILTETTKNAGKRTADGSEFEKRTADGSEFESPKKKAKVE

SEQ ID NO: 7557 - protein, 2218 aa, synthetic construct
MPAAKRVKLDGGDKKYSIGLDIGTNSVGWAVITDEYKVPSKKFKVLGNTDRHSIKKNLIGALLFDSGETAEATRLKRTARRRYTRRKNRICYLQEIFSNEMAKVDDSFFHRLEESFLVEEDKKHERHPIFGNIVDEVAYHEKYPTIYHLRKKLVDSTDKADLRLIYLALAHMIKFRGHFLIEGDLNPDNSDVDKLFIQLVQTYNQLFEENPINASGVDAKAILSARLSKSRRLENLIAQLPGEKKNGLFGNLIALSLGLTPNFKSNFDLAEDAKLQLSKDTYDDDLDNLLAQIGDQYADLFLAAKNLSDAILLSDILRVNTEITKAPLSASMIKRYDEHHQDLTLLKALVRQQLPEKYKEIFFDQSKNGYAGYIDGGASQEEFYKFIKPILEKMDGTEELLVKLNREDLLRKQRTFDNGSIPHQIHLGELHAILRRQEDFYPFLKDNREKIEKILTFRIPYYVGPLARGNSRFAWMTRKSEETITPWNFEEVVDKGASAQSFIERMTNFDKNLPNEKVLPKHSLLYEYFTVYNELTKVKYVTEGMRKPAFLSGEQKKAIVDLLFKTNRKVTVKQLKEDYFKKIECFDSVEISGVEDRFNASLGTYHDLLKIIKDKDFLDNEENEDILEDIVLTLTLFEDREMIEERLKTYAHLFDDKVMKQLKRRRYTGWGRLSRKLINGIRDKQSGKTILDFLKSDGFANRNFMQLIHDDSLTFKEDIQKAQVSGQGDSLHEHIANLAGSPAIKKGILQTVKVVDELVKVMGRHKPENIVIEMARENQTTQKGQKNSRERMKRIEEGIKELGSQILKEHPVENTQLQNEKLYLYYLQNGRDMYVDQELDINRLSDYDVDHIVPQSFLKDDSIDNKVLTRSDKARGKSDNVPSEEVVKKMKNYWRQLLNAKLITQRKFDNLTKAERGGLSELDKAGFIKRQLVETRQITKHVAQILDSRMNTKYDENDKLIREVKVITLKSKLVSDFRKDFQFYKVREINNYHHAHDAYLNAVVGTALIKKYPKLESEFVYGDYKVYDVRKMIAKSEQEIGKATAKYFFYSNIMNFFKTEITLANGEIRKRPLIETNGETGEIVWDKGRDFATVRKVLSMPQVNIVKKTEVQTGGFSKESILPKRNSDKLIARKKDWDPKKYGGFDSPTVAYSVLVVAKVEKGKSKKLKSVKELLGITIMERSSFEKNPIDFLEAKGYKEVKKDLIIKLPKYSLFELENGRKRMLASAGELQKGNELALPSKYVNFLYLASHYEKLKGSPEDNEQKQLFVEQHKHYLDEIIEQISEFSKRVILADANLDKVLSAYNKHRDKPIREQAENIIHLFTLTNLGAPAAFKYFDTTIDRKRYTSTKEVLDATLIHQSITGLYETRIDLSQLGGDGGPAPEAAAKGGGGGTLGDQGSRGSDPLPEPRVTLTVEGIPTEFLVNTGAEHSVLTKPMGKMGSKRTVVAGATGSKVYPWTTKRLLKIGQKQVTHSFLVIPECPAPLLGRDLLTKLKAQIQFSTEGPQVTWEDRPAMCLVLNLEEEYRLHEKPVPPSIDPSWLQLFPMVWAEKAGMGLANQVPPVVVELKSDASPVAVRQYPMSKEAREGIRPHIQRFLDLGILVPCQSPWNTPLLPVKKPGTNDYRPVQDLREVNKRVQDIHPTVPNPYNLLSSLPPSHTWYSVLDLKDAFFCLKLHPNSQPLFAFEWRDPEKGNTGQLTWTRLPQGFKNSPTLFNEALHRDLASFRALNPQVVMLQYVDDLLVAAPTYRDCKEGTRRLLQELSKLGYRVSAKKAQLCREEVTYLGYLLKGGKRWLTPARKATVMKIPTPTTPRQVREFLGKAGFCRLFIPGFASLAAPLYPLTRPKVPFTWTEAHQEAFGRIKEALLSAPALALPDLTKPFALYVDEKEGVARGVLTQTLGPWRRPVAYLSKKLDPVASGWPTCLKAIAAVALLLKDADKLTLGQNVLVIAPHNLESIVRQPPDRWMTNARMTHYQSLLLNERVSFAPPAILNPATLLPVESDDTPIHICSEILAEETGTRPDLRDQPLPGVPAWYTDGSSFIMDGRRQAGAAIVDNKRTVWASNLPEGTSAQKAELIALTQALRLAEGKSINIYTDSRYAFATAHVHGAIYKQRGWLTSAGKDIKNKEEILALLEAIHLPKRVAIIHCPGHQRGTDPVATGNRKADEAAKQAAQSTRILTETTKNAGKRTADGSEFEKRTADGSEFESPKKKAKVE

SEQ ID NO: 7558 - protein, 2096 aa, synthetic construct
MPAAKRVKLDGGDKKYSIGLDIGTNSVGWAVITDEYKVPSKKFKVLGNTDRHSIKKNLIGALLFDSGETAEATRLKRTARRRYTRRKNRICYLQEIFSNEMAKVDDSFFHRLEESFLVEEDKKHERHPIFGNIVDEVAYHEKYPTIYHLRKKLVDSTDKADLRLIYLALAHMIKFRGHFLIEGDLNPDNSDVDKLFIQLVQTYNQLFEENPINASGVDAKAILSARLSKSRRLENLIAQLPGEKKNGLFGNLIALSLGLTPNFKSNFDLAEDAKLQLSKDTYDDDLDNLLAQIGDQYADLFLAAKNLSDAILLSDILRVNTEITKAPLSASMIKRYDEHHQDLTLLKALVRQQLPEKYKEIFFDQSKNGYAGYIDGGASQEEFYKFIKPILEKMDGTEELLVKLNREDLLRKQRTFDNGSIPHQIHLGELHAILRRQEDFYPFLKDNREKIEKILTFRIPYYVGPLARGNSRFAWMTRKSEETITPWNFEEVVDKGASAQSFIERMTNFDKNLPNEKVLPKHSLLYEYFTVYNELTKVKYVTEGMRKPAFLSGEQKKAIVDLLFKTNRKVTVKQLKEDYFKKIECFDSVEISGVEDRFNASLGTYHDLLKIIKDKDFLDNEENEDILEDIVLTLTLFEDREMIEERLKTYAHLFDDKVMKQLKRRRYTGWGRLSRKLINGIRDKQSGKTILDFLKSDGFANRNFMQLIHDDSLTFKEDIQKAQVSGQGDSLHEHIANLAGSPAIKKGILQTVKVVDELVKVMGRHKPENIVIEMARENQTTQKGQKNSRERMKRIEEGIKELGSQILKEHPVENTQLQNEKLYLYYLQNGRDMYVDQELDINRLSDYDVDHIVPQSFLKDDSIDNKVLTRSDKARGKSDNVPSEEVVKKMKNYWRQLLNAKLITQRKFDNLTKAERGGLSELDKAGFIKRQLVETRQITKHVAQILDSRMNTKYDENDKLIREVKVITLKSKLVSDFRKDFQFYKVREINNYHHAHDAYLNAVVGTALIKKYPKLESEFVYGDYKVYDVRKMIAKSEQEIGKATAKYFFYSNIMNFFKTEITLANGEIRKRPLIETNGETGEIVWDKGRDFATVRKVLSMPQVNIVKKTEVQTGGFSKESILPKRNSDKLIARKKDWDPKKYGGFDSPTVAYSVLVVAKVEKGKSKKLKSVKELLGITIMERSSFEKNPIDFLEAKGYKEVKKDLIIKLPKYSLFELENGRKRMLASAGELQKGNELALPSKYVNFLYLASHYEKLKGSPEDNEQKQLFVEQHKHYLDEIIEQISEFSKRVILADANLDKVLSAYNKHRDKPIREQAENIIHLFTLTNLGAPAAFKYFDTTIDRKRYTSTKEVLDATLIHQSITGLYETRIDLSQLGGDGGPAPEAAAKGGGGGTLNIEDEYRLHETSKGPDVPLGSTWLSDFPQAWAETGGMGLAVRQAPLIIPLKATSTPVSIKQYPMSQEARLGIKPHIQRLLDQGILVPCQSPWNTPLLPVKKPGTNDYRPVQDLREVNKRVEDIHPTVPNPYNLLSGLPPSHQWYTVLDLKDAFFCLRLHPTSQSLFAFEWRDPEMGISGQLTWTRLPQGFKNSPTLFNEALHRDLADFRIQHPDLILLQYVDDLLLAATSELDCQQGTRALLQTLGDLGYRASAKKAQICQKQVKYLGYLLKEGQRWLTEARKETVMGQPTPKTPRQLREFLGKAGFCRLFIPGFAEMAAPLYPLTKPGTLFEWGPDQQKAYQEIKQALLTAPALGLPDLTKPFELFVDEKQGYAKGVLTQKLGPWRRPVAYLSKKLDPVAAGWPPCLRMVAAIAVLTKDAGKLTMGQPLVILAPHAVEALVKQPPDRWLSNARMTHYQALLLDTDRVQFGPIVALNPATLLPLPEEGLQHDCLDILAEAHGTRPDLTDQPLPDADHTWYTDGSSFLQEGQRKAGAAVTTETEVVWAKALPAGTSAQRAELIALTQALKMAEGKKLNVYTDSRYAFATAHIHGEIYRRRGWLTSEGKEIKNKDEILALLKALFLPKRLSIIHCPGHQKGNRAEARGNRMADQAAREVATRETPETSTLLAGKRTADGSEFEKRTADGSEFESPKKKAKVE

SEQ ID NO: 7559 - protein, 2096 aa, synthetic construct
MPAAKRVKLDGGDKKYSIGLDIGTNSVGWAVITDEYKVPSKKFKVLGNTDRHSIKKNLIGALLFDSGETAEATRLKRTARRRYTRRKNRICYLQEIFSNEMAKVDDSFFHRLEESFLVEEDKKHERHPIFGNIVDEVAYHEKYPTIYHLRKKLVDSTDKADLRLIYLALAHMIKFRGHFLIEGDLNPDNSDVDKLFIQLVQTYNQLFEENPINASGVDAKAILSARLSKSRRLENLIAQLPGEKKNGLFGNLIALSLGLTPNFKSNFDLAEDAKLQLSKDTYDDDLDNLLAQIGDQYADLFLAAKNLSDAILLSDILRVNTEITKAPLSASMIKRYDEHHQDLTLLKALVRQQLPEKYKEIFFDQSKNGYAGYIDGGASQEEFYKFIKPILEKMDGTEELLVKLNREDLLRKQRTFDNGSIPHQIHLGELHAILRRQEDFYPFLKDNREKIEKILTFRIPYYVGPLARGNSRFAWMTRKSEETITPWNFEEVVDKGASAQSFIERMTNFDKNLPNEKVLPKHSLLYEYFTVYNELTKVKYVTEGMRKPAFLSGEQKKAIVDLLFKTNRKVTVKQLKEDYFKKIECFDSVEISGVEDRFNASLGTYHDLLKIIKDKDFLDNEENEDILEDIVLTLTLFEDREMIEERLKTYAHLFDDKVMKQLKRRRYTGWGRLSRKLINGIRDKQSGKTILDFLKSDGFANRNFMQLIHDDSLTFKEDIQKAQVSGQGDSLHEHIANLAGSPAIKKGILQTVKVVDELVKVMGRHKPENIVIEMARENQTTQKGQKNSRERMKRIEEGIKELGSQILKEHPVENTQLQNEKLYLYYLQNGRDMYVDQELDINRLSDYDVDHIVPQSFLKDDSIDNKVLTRSDKARGKSDNVPSEEVVKKMKNYWRQLLNAKLITQRKFDNLTKAERGGLSELDKAGFIKRQLVETRQITKHVAQILDSRMNTKYDENDKLIREVKVITLKSKLVSDFRKDFQFYKVREINNYHHAHDAYLNAVVGTALIKKYPKLESEFVYGDYKVYDVRKMIAKSEQEIGKATAKYFFYSNIMNFFKTEITLANGEIRKRPLIETNGETGEIVWDKGRDFATVRKVLSMPQVNIVKKTEVQTGGFSKESILPKRNSDKLIARKKDWDPKKYGGFDSPTVAYSVLVVAKVEKGKSKKLKSVKELLGITIMERSSFEKNPIDFLEAKGYKEVKKDLIIKLPKYSLFELENGRKRMLASAGELQKGNELALPSKYVNFLYLASHYEKLKGSPEDNEQKQLFVEQHKHYLDEIIEQISEFSKRVILADANLDKVLSAYNKHRDKPIREQAENIIHLFTLTNLGAPAAFKYFDTTIDRKRYTSTKEVLDATLIHQSITGLYETRIDLSQLGGDGGPAPEAAAKGGGGGTLNIEDEHRLHETSKEPDVSLGSTWLSDFPQAWAETGGMGLAVRQAPLIIPLKATSTPVSIKQYPMSQEARLGIKPHIQRLLDQGILVPCQSPWNTPLLPVKKPGTNDYRPVQDLREVNKRVEDIHPTVPNPYNLLSGLPPSHQWYTVLDLKDAFFCLRLHPTSQPLFAFEWRDPEMGISGQLTWTRLPQGFKNSPTLFDEALHRDLADFRIQHPDLILLQYVDDLLLAATSELDCQQGTRALLQTLGNLGYRASAKKAQICQKQVKYLGYLLKEGQRWLTEARKETVMGQPTPKTPRQLREFLGTAGFCRLWIPGFAEMAAPLYPLTKTGTLFNWGPDQQKAYQEIKQALLTAPALGLPDLTKPFELFVDEKQGYAKGVLTQKLGPWRRPVAYLSKKLDPVAAGWPPCLRMVAAIAVLTKDAGKLTMGQPLVILAPHAVEALVKQPPDRWLSNARMTHYQALLLDTDRVQFGPVVALNPATLLPLPEEGLQHNCLDILAEAHGTRPDLTDQPLPDADHTWYTDGSSLLQEGQRKAGAAVTTETEVIWAKALPAGTSAQRAELIALTQALKMAEGKKLNVYTDSRYAFATAHIHGEIYRRRGLLTSEGKEIKNKDEILALLKALFLPKRLSIIHCPGHQKGHSAEARGNRMADQAARKAAITETPDTSTLLAGKRTADGSEFEKRTADGSEFESPKKKAKVE

SEQ ID NO: 7560 - protein, 2096 aa, synthetic construct; identical to SEQ ID NO: 7559

SEQ ID NO: 7561 - protein, 2116 aa, synthetic construct
MPAAKRVKLDGGDKKYSIGLDIGTNSVGWAVITDEYKVPSKKFKVLGNTDRHSIKKNLIGALLFDSGETAEATRLKRTARRRYTRRKNRICYLQEIFSNEMAKVDDSFFHRLEESFLVEEDKKHERHPIFGNIVDEVAYHEKYPTIYHLRKKLVDSTDKADLRLIYLALAHMIKFRGHFLIEGDLNPDNSDVDKLFIQLVQTYNQLFEENPINASGVDAKAILSARLSKSRRLENLIAQLPGEKKNGLFGNLIALSLGLTPNFKSNFDLAEDAKLQLSKDTYDDDLDNLLAQIGDQYADLFLAAKNLSDAILLSDILRVNTEITKAPLSASMIKRYDEHHQDLTLLKALVRQQLPEKYKEIFFDQSKNGYAGYIDGGASQEEFYKFIKPILEKMDGTEELLVKLNREDLLRKQRTFDNGSIPHQIHLGELHAILRRQEDFYPFLKDNREKIEKILTFRIPYYVGPLARGNSRFAWMTRKSEETITPWNFEEVVDKGASAQSFIERMTNFDKNLPNEKVLPKHSLLYEYFTVYNELTKVKYVTEGMRKPAFLSGEQKKAIVDLLFKTNRKVTVKQLKEDYFKKIECFDSVEISGVEDRFNASLGTYHDLLKIIKDKDFLDNEENEDILEDIVLTLTLFEDREMIEERLKTYAHLFDDKVMKQLKRRRYTGWGRLSRKLINGIRDKQSGKTILDFLKSDGFANRNFMQLIHDDSLTFKEDIQKAQVSGQGDSLHEHIANLAGSPAIKKGILQTVKVVDELVKVMGRHKPENIVIEMARENQTTQKGQKNSRERMKRIEEGIKELGSQILKEHPVENTQLQNEKLYLYYLQNGRDMYVDQELDINRLSDYDVDHIVPQSFLKDDSIDNKVLTRSDKARGKSDNVPSEEVVKKMKNYWRQLLNAKLITQRKFDNLTKAERGGLSELDKAGFIKRQLVETRQITKHVAQILDSRMNTKYDENDKLIREVKVITLKSKLVSDFRKDFQFYKVREINNYHHAHDAYLNAVVGTALIKKYPKLESEFVYGDYKVYDVRKMIAKSEQEIGKATAKYFFYSNIMNFFKTEITLANGEIRKRPLIETNGETGEIVWDKGRDFATVRKVLSMPQVNIVKKTEVQTGGFSKESILPKRNSDKLIARKKDWDPKKYGGFDSPTVAYSVLVVAKVEKGKSKKLKSVKELLGITIMERSSFEKNPIDFLEAKGYKEVKKDLIIKLPKYSLFELENGRKRMLASAGELQKGNELALPSKYVNFLYLASHYEKLKGSPEDNEQKQLFVEQHKHYLDEIIEQISEFSKRVILADANLDKVLSAYNKHRDKPIREQAENIIHLFTLTNLGAPAAFKYFDTTIDRKRYTSTKEVLDATLIHQSITGLYETRIDLSQLGGDGGPAPEAAAKGGGGGVQEISDSRPMLHIYLNGRRFLGLLDTGADKTCIAGRDWPANWPIHQTESSLQGLGMACGVARSSQPLRWQHEDKSGIIHPFVIPTLPFTLWGRDIMKDIKVRLMTDSPDDSQDLMIGAIESNLFADQISWKSDQPVWLNQWPLKQEKLQALQQLVTEQLQLGHLEESNSPWNTPVFVIKKKSGKWRLLQDLRAVNATMHDMGALQPGLPSPVAVPKGWEIIIIDLQDCFFNIKLHPEDCKRFAFSVPSPNFKRPYQRFQWKVLPQGMKNSPTLCQKFVDKAILTVRDKYQDSYIVHYMDDILLAHPSRSIVDEILTSMIQALNKHGLVVSTEKIQKYDNLKYLGTHIQGDSVSYQKLQIRTDKLRTLNDFQKLLGNINWIRPFLKLTTGELKPLFEILNGDSNPISTRKLTPEACKALQLMNERLSTARVKRLDLSQPWSLCILKTEYTPTACLWQDGVVEWIHLPHISPKVITPYDIFCTQLIIKGRHRSKELFSKDPDYIVVPYTKVQFDLLLQEKEDWPISLLGFLGEVHFHLPKDPLLTFTLQTAIIFPHMTSTTPLEKGIVIFTDGSANGRSVTYIQGREPIIKENTQNTAQQAEIVAVITAFEEVSQPFNLYTDSKYVTGLFPEIETATLSPRTKIYTELKHLQRLIHKRQEKFYIGHIRGHTGLPGPLAQGNAYADSLTRILTAAGKRTADGSEFEKRTADGSEFESPKKKAKVE

SEQ ID NO: 7562 - protein, 2090 aa, synthetic construct
MPAAKRVKLDGGDKKYSIGLDIGTNSVGWAVITDEYKVPSKKFKVLGNTDRHSIKKNLIGALLFDSGETAEATRLKRTARRRYTRRKNRICYLQEIFSNEMAKVDDSFFHRLEESFLVEEDKKHERHPIFGNIVDEVAYHEKYPTIYHLRKKLVDSTDKADLRLIYLALAHMIKFRGHFLIEGDLNPDNSDVDKLFIQLVQTYNQLFEENPINASGVDAKAILSARLSKSRRLENLIAQLPGEKKNGLFGNLIALSLGLTPNFKSNFDLAEDAKLQLSKDTYDDDLDNLLAQIGDQYADLFLAAKNLSDAILLSDILRVNTEITKAPLSASMIKRYDEHHQDLTLLKALVRQQLPEKYKEIFFDQSKNGYAGYIDGGASQEEFYKFIKPILEKMDGTEELLVKLNREDLLRKQRTFDNGSIPHQIHLGELHAILRRQEDFYPFLKDNREKIEKILTFRIPYYVGPLARGNSRFAWMTRKSEETITPWNFEEVVDKGASAQSFIERMTNFDKNLPNEKVLPKHSLLYEYFTVYNELTKVKYVTEGMRKPAFLSGEQKKAIVDLLFKTNRKVTVKQLKEDYFKKIECFDSVEISGVEDRFNASLGTYHDLLKIIKDKDFLDNEENEDILEDIVLTLTLFEDREMIEERLKTYAHLFDDKVMKQLKRRRYTGWGRLSRKLINGIRDKQSGKTILDFLKSDGFANRNFMQLIHDDSLTFKEDIQKAQVSGQGDSLHEHIANLAGSPAIKKGILQTVKVVDELVKVMGRHKPENIVIEMARENQTTQKGQKNSRERMKRIEEGIKELGSQILKEHPVENTQLQNEKLYLYYLQNGRDMYVDQELDINRLSDYDVDHIVPQSFLKDDSIDNKVLTRSDKARGKSDNVPSEEVVKKMKNYWRQLLNAKLITQRKFDNLTKAERGGLSELDKAGFIKRQLVETRQITKHVAQILDSRMNTKYDENDKLIREVKVITLKSKLVSDFRKDFQFYKVREINNYHHAHDAYLNAVVGTALIKKYPKLESEFVYGDYKVYDVRKMIAKSEQEIGKATAKYFFYSNIMNFFKTEITLANGEIRKRPLIETNGETGEIVWDKGRDFATVRKVLSMPQVNIVKKTEVQTGGFSKESILPKRNSDKLIARKKDWDPKKYGGFDSPTVAYSVLVVAKVEKGKSKKLKSVKELLGITIMERSSFEKNPIDFLEAKGYKEVKKDLIIKLPKYSLFELENGRKRMLASAGELQKGNELALPSKYVNFLYLASHYEKLKGSPEDNEQKQLFVEQHKHYLDEIIEQISEFSKRVILADANLDKVLSAYNKHRDKPIREQAENIIHLFTLTNLGAPAAFKYFDTTIDRKRYTSTKEVLDATLIHQSITGLYETRIDLSQLGGDGGPAPEAAAKGGGGGTLQLDDEYRLYSPLVKPDQNIQFWLEQFPQAWAETAGMGLAKQVPPQVIQLKASATPVSVRQYPLSKEAQEGIRPHVQRLIQQGILVPVQSPWNTPLLPVRKPGTNDYRPVQDLREVNKRVQDIHPTVPNPYNLLCALPPQRSWYTVLDLKDAFFCLRLHPTSQPLFAFEWRDPGTGRTGQLTWTRLPQGFKNSPTIFDEALHRDLANFRIQHPQVTLLQYVDDLLLAGATKQDCLEGTKALLLELSDLGYRASAKKAQICRREVTYLGYSLRDGQRWLTEARKKTVVQIPAPTTAKQVREFLGTAGFCRLWIPGFATLAAPLYPLTKEKGEFSWAPEHQKAFDAIKKALLSAPALALPDVTKPFTLYVDERKGVARGVLTQTLGPWRRPVAYLSKKLDPVASGWPVCLKAIAAVAILVKDADKLTLGQNITVIAPHALENIVRQPPDRWMTNARMTHYQSLLLTERVTFAPPAALNPATLLPEETDEPVTHDCHQLLIEETGVRKDLTDIPLTGEVLTWFTDGSSYVVEGKRMAGAAVVDGTRTIWASSLPEGTSAQKAELMALTQALRLAEGKSINIYTDSRYAFATAHVHGAIYKQRGLLTSAGREIKNKEEILSLLEALHLPKRLAIIHCPGHQKAKDPISRGNQMADRVAKQAAQGVNLLAGKRTADGSEFEKRTADGSEFESPKKKAKVE

SEQ ID NO: 7563 - protein, 2176 aa, synthetic construct
MPAAKRVKLDGGDKKYSIGLDIGTNSVGWAVITDEYKVPSKKFKVLGNTDRHSIKKNLIGALLFDSGETAEATRLKRTARRRYTRRKNRICYLQEIFSNEMAKVDDSFFHRLEESFLVEEDKKHERHPIFGNIVDEVAYHEKYPTIYHLRKKLVDSTDKADLRLIYLALAHMIKFRGHFLIEGDLNPDNSDVDKLFIQLVQTYNQLFEENPINASGVDAKAILSARLSKSRRLENLIAQLPGEKKNGLFGNLIALSLGLTPNFKSNFDLAEDAKLQLSKDTYDDDLDNLLAQIGDQYADLFLAAKNLSDAILLSDILRVNTEITKAPLSASMIKRYDEHHQDLTLLKALVRQQLPEKYKEIFFDQSKNGYAGYIDGGASQEEFYKFIKPILEKMDGTEELLVKLNREDLLRKQRTFDNGSIPHQIHLGELHAILRRQEDFYPFLKDNREKIEKILTFRIPYYVGPLARGNSRFAWMTRKSEETITPWNFEEVVDKGASAQSFIERMTNFDKNLPNEKVLPKHSLLYEYFTVYNELTKVKYVTEGMRKPAFLSGEQKKAIVDLLFKTNRKVTVKQLKEDYFKKIECFDSVEISGVEDRFNASLGTYHDLLKIIKDKDFLDNEENEDILEDIVLTLTLFEDREMIEERLKTYAHLFDDKVMKQLKRRRYTGWGRLSRKLINGIRDKQSGKTILDFLKSDGFANRNFMQLIHDDSLTFKEDIQKAQVSGQGDSLHEHIANLAGSPAIKKGILQTVKVVDELVKVMGRHKPENIVIEMARENQTTQKGQKNSRERMKRIEEGIKELGSQILKEHPVENTQLQNEKLYLYYLQNGRDMYVDQELDINRLSDYDVDHIVPQSFLKDDSIDNKVLTRSDKARGKSDNVPSEEVVKKMKNYWRQLLNAKLITQRKFDNLTKAERGGLSELDKAGFIKRQLVETRQITKHVAQILDSRMNTKYDENDKLIREVKVITLKSKLVSDFRKDFQFYKVREINNYHHAHDAYLNAVVGTALIKKYPKLESEFVYGDYKVYDVRKMIAKSEQEIGKATAKYFFYSNIMNFFKTEITLANGEIRKRPLIETNGETGEIVWDKGRDFATVRKVLSMPQVNIVKKTEVQTGGFSKESILPKRNSDKLIARKKDWDPKKYGGFDSPTVAYSVLVVAKVEKGKSKKLKSVKELLGITIMERSSFEKNPIDFLEAKGYKEVKKDLIIKLPKYSLFELENGRKRMLASAGELQKGNELALPSKYVNFLYLASHYEKLKGSPEDNEQKQLFVEQHKHYLDEIIEQISEFSKRVILADANLDKVLSAYNKHRDKPIREQAENIIHLFTLTNLGAPAAFKYFDTTIDRKRYTSTKEVLDATLIHQSITGLYETRIDLSQLGGDGGPAPEAAAKGGGGGMDPLQLLQPLEAEIKGTKLKAHWNSGATITCVPEAFLEDERPIQTMLIKTIHGEKQQDVYYLTFKVQGRKVEAEVLASPYDYILLNPSDVPWLMKKPLQLTVLVPLHEYQERLLQQTALPKEQKELLQKLFLKYDALWQHWENQVGHRRIKPHNIATGTLAPRPQKQYPINPKAKPSIQIVIDDLLKQGVLIQQNSTMNTPVYPVPKPDGKWRMVLDYREVNKTIPLIAAQNQHSAGILSSIYRGKYKTTLDLTNGFWAHPITPESYWLTAFTWQGKQYCWTRLPQGFLNSPALFTADVVDLLKEIPNVQAYVDDIYISHDDPQEHLEQLEKIFSILLNAGYVVSLKKSEIAQREVEFLGFNITKEGRGLTDTFKQKLLNITPPKDLKQLQSILGLLNFARNFIPNYSELVKPLYTIVANANGKFISWTEDNSNQLQHIISVLNQADNLEERNPETRLIIKVNSSPSAGYIRYYNEGSKRPIMYVNYIFSKAEAKFTQTEKLLTTMHKGLIKAMDLAMGQEILVYSPIVSMTKIQRTPLPERKALPVRWITWMTYLEDPRIQFHYDKSLPELQQIPNVTEDVIAKTKHPSEFAMVFYTDGSAIKHPDVNKSHSAGMGIAQVQFIPEYKIVHQWSIPLGDHTAQLAEIAAVEFACKKALKISGPVLIVTDSFYVAESANKELPYWKSNGFLNNKKKPLRHVSKWKSIAECLQLKPDIIIMHEKGHQQPMTTLHTEGNNLADKLATQGSYVVHAGKRTADGSEFEKRTADGSEFESPKKKAKVE

SEQ ID NO: 7564 - protein, 2176 aa, synthetic construct
MPAAKRVKLDGGDKKYSIGLDIGTNSVGWAVITDEYKVPSKKFKVLGNTDRHSIKKNLIGALLFDSGETAEATRLKRTARRRYTRRKNRICYLQEIFSNEMAKVDDSFFHRLEESFLVEEDKKHERHPIFGNIVDEVAYHEKYPTIYHLRKKLVDSTDKADLRLIYLALAHMIKFRGHFLIEGDLNPDNSDVDKLFIQLVQTYNQLFEENPINASGVDAKAILSARLSKSRRLENLIAQLPGEKKNGLFGNLIALSLGLTPNFKSNFDLAEDAKLQLSKDTYDDDLDNLLAQIGDQYADLFLAAKNLSDAILLSDILRVNTEITKAPLSASMIKRYDEHHQDLTLLKALVRQQLPEKYKEIFFDQSKNGYAGYIDGGASQEEFYKFIKPILEKMDGTEELLVKLNREDLLRKQRTFDNGSIPHQIHLGELHAILRRQEDFYPFLKDNREKIEKILTFRIPYYVGPLARGNSRFAWMTRKSEETITPWNFEEVVDKGASAQSFIERMTNFDKNLPNEKVLPKHSLLYEYFTVYNELTKVKYVTEGMRKPAFLSGEQKKAIVDLLFKTNRKVTVKQLKEDYFKKIECFDSVEISGVEDRFNASLGTYHDLLKIIKDKDFLDNEENEDILEDIVLTLTLFEDREMIEERLKTYAHLFDDKVMKQLKRRRYTGWGRLSRKLINGIRDKQSGKTILDFLKSDGFANRNFMQLIHDDSLTFKEDIQKAQVSGQGDSLHEHIANLAGSPAIKKGILQTVKVVDELVKVMGRHKPENIVIEMARENQTTQKGQKNSRERMKRIEEGIKELGSQILKEHPVENTQLQNEKLYLYYLQNGRDMYVDQELDINRLSDYDVDHIVPQSFLKDDSIDNKVLTRSDKARGKSDNVPSEEVVKKMKNYWRQLLNAKLITQRKFDNLTKAERGGLSELDKAGFIKRQLVETRQITKHVAQILDSRMNTKYDENDKLIREVKVITLKSKLVSDFRKDFQFYKVREINNYHHAHDAYLNAVVGTALIKKYPKLESEFVYGDYKVYDVRKMIAKSEQEIGKATAKYFFYSNIMNFFKTEITLANGEIRKRPLIETNGETGEIVWDKGRDFATVRKVLSMPQVNIVKKTEVQTGGFSKESILPKRNSDKLIARKKDWDPKKYGGFDSPTVAYSVLVVAKVEKGKSKKLKSVKELLGITIMERSSFEKNPIDFLEAKGYKEVKKDLIIKLPKYSLFELENGRKRMLASAGELQKGNELALPSKYVNFLYLASHYEKLKGSPEDNEQKQLFVEQHKHYLDEIIEQISEFSKRVILADANLDKVLSAYNKHRDKPIREQAENIIHLFTLTNLGAPAAFKYFDTTIDRKRYTSTKEVLDATLIHQSITGLYETRIDLSQLGGDGGPAPEAAAKGGGGGMDPLQLLQPLEAEIKGTKLKAHWNSGATITCVPEAFLEDERPIQTMLIKTIHGEKQQDVYYLTFKVQGRKVEAEVLASPYDYILLNPSDVPWLMKKPLQLTVLVPLHEYQERLLQQTALPKEQKELLQKLFLKYDALWQHWENQVGHRRIKPHNIATGTLAPRPQKQYPINPKAKPSIQIVIDDLLKQGVLIQQNSTMNTPVYPVPKPDGKWRMVLDYREVNKTIPLIAAQNQHSAGILSSIYRGKYKTTLDLTNGFWAHPITPESYWLTAFTWQGKQYCWTRLPQGFLNSPALFNADVVDLLKEIPNVQAYVDDIYISHDDPQEHLEQLEKIFSILLNAGYVVSLKKSEIAQREVEFLGFNITKEGRGLTDTFKQKLLNITPPKDLKQLQSILGLLNFARNFIPNYSELVKPLYTIVAPANGKFISWTEDNSNQLQHIISVLNQADNLEERNPETRLIIKVNSSPSAGYIRYYNEGSKRPIMYVNYIFSKAEAKFTQTEKLLTTMHKGLIKAMDLAMGQEILVYSPIVSMTKIQRTPLPERKALPVRWITWMTYLEDPRIQFHYDKSLPELQQIPNVTEDVIAKTKHPSEFAMVFYTDGSAIKHPDVNKSHSAGMGIAQVQFIPEYKIVHQWSIPLGDHTAQLAEIAAVEFACKKALKISGPVLIVTDSFYVAESANKELPYWKSNGFLNNKKKPLRHVSKWKSIAECLQLKPDIIIMHEKGHQQPMTTLHTEGNNLADKLATQGSYVVHAGKRTADGSEFEKRTADGSEFESPKKKAKVE

SEQ ID NO: 7565 - protein, 2087 aa, synthetic construct
MPAAKRVKLDGGDKKYSIGLDIGTNSVGWAVITDEYKVPSKKFKVLGNTDRHSIKKNLIGALLFDSGETAEATRLKRTARRRYTRRKNRICYLQEIFSNEMAKVDDSFFHRLEESFLVEEDKKHERHPIFGNIVDEVAYHEKYPTIYHLRKKLVDSTDKADLRLIYLALAHMIKFRGHFLIEGDLNPDNSDVDKLFIQLVQTYNQLFEENPINASGVDAKAILSARLSKSRRLENLIAQLPGEKKNGLFGNLIALSLGLTPNFKSNFDLAEDAKLQLSKDTYDDDLDNLLAQIGDQYADLFLAAKNLSDAILLSDILRVNTEITKAPLSASMIKRYDEHHQDLTLLKALVRQQLPEKYKEIFFDQSKNGYAGYIDGGASQEEFYKFIKPILEKMDGTEELLVKLNREDLLRKQRTFDNGSIPHQIHLGELHAILRRQEDFYPFLKDNREKIEKILTFRIPYYVGPLARGNSRFAWMTRKSEETITPWNFEEVVDKGASAQSFIERMTNFDKNLPNEKVLPKHSLLYEYFTVYNELTKVKYVTEGMRKPAFLSGEQKKAIVDLLFKTNRKVTVKQLKEDYFKKIECFDSVEISGVEDRFNASLGTYHDLLKIIKDKDFLDNEENEDILEDIVLTLTLFEDREMIEERLKTYAHLFDDKVMKQLKRRRYTGWGRLSRKLINGIRDKQSGKTILDFLKSDGFANRNFMQLIHDDSLTFKEDIQKAQVSGQGDSLHEHIANLAGSPAIKKGILQTVKVVDELVKVMGRHKPENIVIEMARENQTTQKGQKNSRERMKRIEEGIKELGSQILKEHPVENTQLQNEKLYLYYLQNGRDMYVDQELDINRLSDYDVDHIVPQSFLKDDSIDNKVLTRSDKARGKSDNVPSEEVVKKMKNYWRQLLNAKLITQRKFDNLTKAERGGLSELDKAGFIKRQLVETRQITKHVAQILDSRMNTKYDENDKLIREVKVITLKSKLVSDFRKDFQFYKVREINNYHHAHDAYLNAVVGTALIKKYPKLESEFVYGDYKVYDVRKMIAKSEQEIGKATAKYFFYSNIMNFFKTEITLANGEIRKRPLIETNGETGEIVWDKGRDFATVRKVLSMPQVNIVKKTEVQTGGFSKESILPKRNSDKLIARKKDWDPKKYGGFDSPTVAYSVLVVAKVEKGKSKKLKSVKELLGITIMERSSFEKNPIDFLEAKGYKEVKKDLIIKLPKYSLFELENGRKRMLASAGELQKGNELALPSKYVNFLYLASHYEKLKGSPEDNEQKQLFVEQHKHYLDEIIEQISEFSKRVILADANLDKVLSAYNKHRDKPIREQAENIIHLFTLTNLGAPAAFKYFDTTIDRKRYTSTKEVLDATLIHQSITGLYETRIDLSQLGGDGGPAPEAAAKGGGGGIPWLMKKPLQLTTLVPLQEYEERLLKQTMLTGSYKEKLQSLFLKYDALWQHWENQVGHRRIKPHHIATGTVNPRPQKQYPINPKAKASIQTVINDLLKQGVLIQQNSIMNTPVYPVPKPDGKWRMVLDYREVNKTIPLIAAQNQHSAGILSSIFRGKYKTTLDLSNGFWAHSITPESYWLTAFTWLGQQYCWTRLPQGFLNSPALFTADVVDLLKEVPNVQVYVDDIYISHDDPREHLEQLEKVFSLLLNAGYVVSLKKSEIAQHEVEFLGFNITKEGRGLTETFKQKLLNITPPRDLKQLQSILGLLNFARNFIPNFSELVKPLYNIIATANGKYITWTTDNSQQLQNIISMLNSAENLEERNPEVRLIMKVNTSPSAGYIRFYNEFAKRPIMYLNYVYTKAEVKFTNTEKLLTTIHKGLIKALDLGMGQEILVYSPIVSMTKIQKTPLPERKALPIRWITWMSYLEDPRIQFHYDKTLPELQQVPTVTDDIIAKIKHPSEFSMVFYTDGSAIKHPNVNKSHNAGMGIAQVQFKPEFTVINTWSIPLGDHTAQLAEVAAVEFACKKALKIDGPVLIVTDSFYVAESVNKELPYWQSNGFFNNKKKPLKHVSKWKSIADCIQLKPDIIIIHEKGHQPTASTFHTEGNNLADKLATQGSYVVNAGKRTADGSEFEKRTADGSEFESPKKKAKVE

SEQ ID NO: 7566 - protein, 2096 aa, synthetic construct
MPAAKRVKLDGGDKKYSIGLDIGTNSVGWAVITDEYKVPSKKFKVLGNTDRHSIKKNLIGALLFDSGETAEATRLKRTARRRYTRRKNRICYLQEIFSNEMAKVDDSFFHRLEESFLVEEDKKHERHPIFGNIVDEVAYHEKYPTIYHLRKKLVDSTDKADLRLIYLALAHMIKFRGHFLIEGDLNPDNSDVDKLFIQLVQTYNQLFEENPINASGVDAKAILSARLSKSRRLENLIAQLPGEKKNGLFGNLIALSLGLTPNFKSNFDLAEDAKLQLSKDTYDDDLDNLLAQIGDQYADLFLAAKNLSDAILLSDILRVNTEITKAPLSASMIKRYDEHHQDLTLLKALVRQQLPEKYKEIFFDQSKNGYAGYIDGGASQEEFYKFIKPILEKMDGTEELLVKLNREDLLRKQRTFDNGSIPHQIHLGELHAILRRQEDFYPFLKDNREKIEKILTFRIPYYVGPLARGNSRFAWMTRKSEETITPWNFEEVVDKGASAQSFIERMTNFDKNLPNEKVLPKHSLLYEYFTVYNELTKVKYVTEGMRKPAFLSGEQKKAIVDLLFKTNRKVTVKQLKEDYFKKIECFDSVEISGVEDRFNASLGTYHDLLKIIKDKDFLDNEENEDILEDIVLTLTLFEDREMIEERLKTYAHLFDDKVMKQLKRRRYTGWGRLSRKLINGIRDKQSGKTILDFLKSDGFANRNFMQLIHDDSLTFKEDIQKAQVSGQGDSLHEHIANLAGSPAIKKGILQTVKVVDELVKVMGRHKPENIVIEMARENQTTQKGQKNSRERMKRIEEGIKELGSQILKEHPVENTQLQNEKLYLYYLQNGRDMYVDQELDINRLSDYDVDHIVPQSFLKDDSIDNKVLTRSDKARGKSDNVPSEEVVKKMKNYWRQLLNAKLITQRKFDNLTKAERGGLSELDKAGFIKRQLVETRQITKHVAQILDSRMNTKYDENDKLIREVKVITLKSKLVSDFRKDFQFYKVREINNYHHAHDAYLNAVVGTALIKKYPKLESEFVYGDYKVYDVRKMIAKSEQEIGKATAKYFFYSNIMNFFKTEITLANGEIRKRPLIETNGETGEIVWDKGRDFATVRKVLSMPQVNIVKKTEVQTGGFSKESILPKRNSDKLIARKKDWDPKKYGGFDSPTVAYSVLVVAKVEKGKSKKLKSVKELLGITIMERSSFEKNPIDFLEAKGYKEVKKDLIIKLPKYSLFELENGRKRMLASAGELQKGNELALPSKYVNFLYLASHYEKLKGSPEDNEQKQLFVEQHKHYLDEIIEQISEFSKRVILADANLDKVLSAYNKHRDKPIREQAENIIHLFTLTNLGAPAAFKYFDTTIDRKRYTSTKEVLDATLIHQSITGLYETRIDLSQLGGDGGPAPEAAAKGGGGGTLNIEDEYRLHETSKEPDVPLGSTWLSDFPQAWAETGGMGLAVRQAPLIIPLKATSTPVSIKQYPMSQEARLGIKPHIQRLLDQGILVPCQSPWNTPLLPVKKPGTNDYRPVQDLREVNKRVEDIHPTVPNPYNLLSGLPPSHQWYTVLDLKDAFFCLRLHPTSQPLFAFEWRDPEMGISGQLTWTRLPQGFKNSPTLFDEALHRDLADFRIQHPDLILLQYVDDLLLAATSEQDCQRGTRALLQTLGNLGYRASAKKAQICQKQVKYLGYLLKEGQRWLTEARKETVMGQPTPKTPRQLREFLGTAGFCRLWIPGFAEMAAPLYPLTKTGTLFNWGPDQQKAYQEIKQALLTAPALGLPDLTKPFELFVDEKQGYAKGVLTQKLGPWRRPVAYLSKKLDPVAAGWPPCLRMVAAIAVLTKDAGKLTMGQPLVILAPHAVEALVKQPPDRWLSNARMTHYQAMLLDTDRVQFGPVVALNPATLLPLPEKEAPHDCLEILAETHGTRPDLTDQPIPDADYTWYTDGSSFLQEGQRRAGAAVTTETEVIWARALPAGTSAQRAELIALTQALKMAEGKKLNVYTDSRYAFATAHVHGEIYRRRGLLTSEGREIKNKNEILALLKALFLPKRLSIIHCPGHQKGNSAEARGNRMADQAAREAAMKAVLETSTLLAGKRTADGSEFEKRTADGSEFESPKKKAKVE

SEQ ID NO: 7567 - protein, 2096 aa, synthetic construct
MPAAKRVKLDGGDKKYSIGLDIGTNSVGWAVITDEYKVPSKKFKVLGNTDRHSIKKNLIGALLFDSGETAEATRLKRTARRRYTRRKNRICYLQEIFSNEMAKVDDSFFHRLEESFLVEEDKKHERHPIFGNIVDEVAYHEKYPTIYHLRKKLVDSTDKADLRLIYLALAHMIKFRGHFLIEGDLNPDNSDVDKLFIQLVQTYNQLFEENPINASGVDAKAILSARLSKSRRLENLIAQLPGEKKNGLFGNLIALSLGLTPNFKSNFDLAEDAKLQLSKDTYDDDLDNLLAQIGDQYADLFLAAKNLSDAILLSDILRVNTEITKAPLSASMIKRYDEHHQDLTLLKALVRQQLPEKYKEIFFDQSKNGYAGYIDGGASQEEFYKFIKPILEKMDGTEELLVKLNREDLLRKQRTFDNGSIPHQIHLGELHAILRRQEDFYPFLKDNREKIEKILTFRIPYYVGPLARGNSRFAWMTRKSEETITPWNFEEVVDKGASAQSFIERMTNFDKNLPNEKVLPKHSLLYEYFTVYNELTKVKYVTEGMRKPAFLSGEQKKAIVDLLFKTNRKVTVKQLKEDYFKKIECFDSVEISGVEDRFNASLGTYHDLLKIIKDKDFLDNEENEDILEDIVLTLTLFEDREMIEERLKTYAHLFDDKVMKQLKRRRYTGWGRLSRKLINGIRDKQSGKTILDFLKSDGFANRNFMQLIHDDSLTFKEDIQKAQVSGQGDSLHEHIANLAGSPAIKKGILQTVKVVDELVKVMGRHKPENIVIEMARENQTTQKGQKNSRERMKRIEEGIKELGSQILKEHPVENTQLQNEKLYLYYLQNGRDMYVDQELDINRLSDYDVDHIVPQSFLKDDSIDNKVLTRSDKARGKSDNVPSEEVVKKMKNYWRQLLNAKLITQRKFDNLTKAERGGLSELDKAGFIKRQLVETRQITKHVAQILDSRMNTKYDENDKLIREVKVITLKSKLVSDFRKDFQFYKVREINNYHHAHDAYLNAVVGTALIKKYPKLESEFVYGDYKVYDVRKMIAKSEQEIGKATAKYFFYSNIMNFFKTEITLANGEIRKRPLIETNGETGEIVWDKGRDFATVRKVLSMPQVNIVKKTEVQTGGFSKESILPKRNSDKLIARKKDWDPKKYGGFDSPTVAYSVLVVAKVEKGKSKKLKSVKELLGITIMERSSFEKNPIDFLEAKGYKEVKKDLIIKLPKYSLFELENGRKRMLASAGELQKGNELALPSKYVNFLYLASHYEKLKGSPEDNEQKQLFVEQHKHYLDEIIEQISEFSKRVILADANLDKVLSAYNKHRDKPIREQAENIIHLFTLTNLGAPAAFKYFDTTIDRKRYTSTKEVLDATLIHQSITGLYETRIDLSQLGGDGGPAPEAAAKGGGGGTLNIEDEYRLHETSKEPDVPLGSTWLSDFPQAWAETGGMGLAVRQAPLIIPLKATSTPVSIKQYPMSQEARLGIKPHIQRLLDQGILVPCQSPWNTPLLPVKKPGTNDYRPVQDLREVNKRVEDIHPTVPNPYNLLSGLPPSHQWYTVLDLKDAFFCLRLHPTSQPLFAFEWRDPEMGISGQLTWTRLPQGFKNSPTLFNEALHRDLADFRIQHPDLILLQYVDDLLLAATSEQDCQRGTRALLQTLGNLGYRASAKKAQICQKQVKYLGYLLKEGQRWLTEARKETVMGQPTPKTPRQLREFLGTAGFCRLWIPGFAEMAAPLYPLTKPGTLFNWGPDQQKAYQEIKQALLTAPALGLPDLTKPFELFVDEKQGYAKGVLTQKLGPWRRPVAYLSKKLDPVAAGWPPCLRMVAAIAVLTKDAGKLTMGQPLVILAPHAVEALVKQPPDRWLSNARMTHYQAMLLDTDRVQFGPVVALNPATLLPLPEKEAPHDCLEILAETHGTRPDLTDQPIPDADYTWYTDGSSFLQEGQRRAGAAVTTETEVIWARALPAGTSAQRAELIALTQALKMAEGKKLNVYTDSRYAFATAHVHGEIYRRRGWLTSEGREIKNKNEILALLKALFLPKRLSIIHCPGHQKGNSAEARGNRMADQAAREAAMKAVLETSTLLAGKRTADGSEFEKRTADGSEFESPKKKAKVE

SEQ ID NO: 7568 - protein, 2096 aa, synthetic construct
MPAAKRVKLDGGDKKYSIGLDIGTNSVGWAVITDEYKVPSKKFKVLGNTDRHSIKKNLIGALLFDSGETAEATRLKRTARRRYTRRKNRICYLQEIFSNEMAKVDDSFFHRLEESFLVEEDKKHERHPIFGNIVDEVAYHEKYPTIYHLRKKLVDSTDKADLRLIYLALAHMIKFRGHFLIEGDLNPDNSDVDKLFIQLVQTYNQLFEENPINASGVDAKAILSARLSKSRRLENLIAQLPGEKKNGLFGNLIALSLGLTPNFKSNFDLAEDAKLQLSKDTYDDDLDNLLAQIGDQYADLFLAAKNLSDAILLSDILRVNTEITKAPLSASMIKRYDEHHQDLTLLKALVRQQLPEKYKEIFFDQSKNGYAGYIDGGASQEEFYKFIKPILEKMDGTEELLVKLNREDLLRKQRTFDNGSIPHQIHLGELHAILRRQEDFYPFLKDNREKIEKILTFRIPYYVGPLARGNSRFAWMTRKSEETITPWNFEEVVDKGASAQSFIERMTNFDKNLPNEKVLPKHSLLYEYFTVYNELTKVKYVTEGMRKPAFLSGEQKKAIVDLLFKTNRKVTVKQLKEDYFKKIECFDSVEISGVEDRFNASLGTYHDLLKIIKDKDFLDNEENEDILEDIVLTLTLFEDREMIEERLKTYAHLFDDKVMKQLKRRRYTGWGRLSRKLINGIRDKQSGKTILDFLKSDGFANRNFMQLIHDDSLTFKEDIQKAQVSGQGDSLHEHIANLAGSPAIKKGILQTVKVVDELVKVMGRHKPENIVIEMARENQTTQKGQKNSRERMKRIEEGIKELGSQILKEHPVENTQLQNEKLYLYYLQNGRDMYVDQELDINRLSDYDVDHIVPQSFLKDDSIDNKVLTRSDKARGKSDNVPSEEVVKKMKNYWRQLLNAKLITQRKFDNLTKAERGGLSELDKAGFIKRQLVETRQITKHVAQILDSRMNTKYDENDKLIREVKVITLKSKLVSDFRKDFQFYKVREINNYHHAHDAYLNAVVGTALIKKYPKLESEFVYGDYKVYDVRKMIAKSEQEIGKATAKYFFYSNIMNFFKTEITLANGEIRKRPLIETNGETGEIVWDKGRDFATVRKVLSMPQVNIVKKTEVQTGGFSKESILPKRNSDKLIARKKDWDPKKYGGFDSPTVAYSVLVVAKVEKGKSKKLKSVKELLGITIMERSSFEKNPIDFLEAKGYKEVKKDLIIKLPKYSLFELENGRKRMLASAGELQKGNELALPSKYVNFLYLASHYEKLKGSPEDNEQKQLFVEQHKHYLDEIIEQISEFSKRVILADANLDKVLSAYNKHRDKPIREQAENIIHLFTLTNLGAPAAFKYFDTTIDRKRYTSTKEVLDATLIHQSITGLYETRIDLSQLGGDGGPAPEAAAKGGGGGTLNIEDEYRLHETSKEPDVPLGSTWLSDFPQAWAETGGMGLAVRQAPLIIPLKATSTPVSIKQYPMSQEARLGIKPHIQRLLDQGILVPCQSPWNTPLLPVKKPGTNDYRPVQDLREVNKRVEDIHPTVPNPYNLLSGLPPSHQWYTVLDLKDAFFCLRLHPTSQPLFAFEWRDPEMGISGQLTWTRLPQGFKNSPTLFNEALHRDLADFRIQHPDLILLQYVDDLLLAATSEQDCQRGTRALLQTLGNLGYRASAKKAQICQKQVKYLGYLLKEGQRWLTEARKETVMGQPTPKTPRQLREFLGKAGFCRLFIPGFAEMAAPLYPLTKPGTLFNWGPDQQKAYQEIKQALLTAPALGLPDLTKPFELFVDEKQGYAKGVLTQKLGPWRRPVAYLSKKLDPVAAGWPPCLRMVAAIAVLTKDAGKLTMGQPLVILAPHAVEALVKQPPDRWLSNARMTHYQAMLLDTDRVQFGPVVALNPATLLPLPEKEAPHDCLEILAETHGTRPDLTDQPIPDADYTWYTDGSSFLQEGQRRAGAAVTTETEVIWARALPAGTSAQRAELIALTQALKMAEGKKLNVYTDSRYAFATAHVHGEIYRRRGWLTSEGREIKNKNEILALLKALFLPKRLSIIHCPGHQKGNSAEARGNRMADQAAREAAMKAVLETSTLLAGKRTADGSEFEKRTADGSEFESPKKKAKVE

SEQ ID NO: 7569 - protein, 2098 aa, synthetic construct
MPAAKRVKLDGGDKKYSIGLDIGTNSVGWAVITDEYKVPSKKFKVLGNTDRHSIKKNLIGALLFDSGETAEATRLKRTARRRYTRRKNRICYLQEIFSNEMAKVDDSFFHRLEESFLVEEDKKHERHPIFGNIVDEVAYHEKYPTIYHLRKKLVDSTDKADLRLIYLALAHMIKFRGHFLIEGDLNPDNSDVDKLFIQLVQTYNQLFEENPINASGVDAKAILSARLSKSRRLENLIAQLPGEKKNGLFGNLIALSLGLTPNFKSNFDLAEDAKLQLSKDTYDDDLDNLLAQIGDQYADLFLAAKNLSDAILLSDILRVNTEITKAPLSASMIKRYDEHHQDLTLLKALVRQQLPEKYKEIFFDQSKNGYAGYIDGGASQEEFYKFIKPILEKMDGTEELLVKLNREDLLRKQRTFDNGSIPHQIHLGELHAILRRQEDFYPFLKDNREKIEKILTFRIPYYVGPLARGNSRFAWMTRKSEETITPWNFEEVVDKGASAQSFIERMTNFDKNLPNEKVLPKHSLLYEYFTVYNELTKVKYVTEGMRKPAFLSGEQKKAIVDLLFKTNRKVTVKQLKEDYFKKIECFDSVEISGVEDRFNASLGTYHDLLKIIKDKDFLDNEENEDILEDIVLTLTLFEDREMIEERLKTYAHLFDDKVMKQLKRRRYTGWGRLSRKLINGIRDKQSGKTILDFLKSDGFANRNFMQLIHDDSLTFKEDIQKAQVSGQGDSLHEHIANLAGSPAIKKGILQTVKVVDELVKVMGRHKPENIVIEMARENQTTQKGQKNSRERMKRIEEGIKELGSQILKEHPVENTQLQNEKLYLYYLQNGRDMYVDQELDINRLSDYDVDHIVPQSFLKDDSIDNKVLTRSDKARGKSDNVPSEEVVKKMKNYWRQLLNAKLITQRKFDNLTKAERGGLSELDKAGFIKRQLVETRQITKHVAQILDSRMNTKYDENDKLIREVKVITLKSKLVSDFRKDFQFYKVREINNYHHAHDAYLNAVVGTALIKKYPKLESEFVYGDYKVYDVRKMIAKSEQEIGKATAKYFFYSNIMNFFKTEITLANGEIRKRPLIETNGETGEIVWDKGRDFATVRKVLSMPQVNIVKKTEVQTGGFSKESILPKRNSDKLIARKKDWDPKKYGGFDSPTVAYSVLVVAKVEKGKSKKLKSVKELLGITIMERSSFEKNPIDFLEAKGYKEVKKDLIIKLPKYSLFELENGRKRMLASAGELQKGNELALPSKYVNFLYLASHYEKLKGSPEDNEQKQLFVEQHKHYLDEIIEQISEFSKRVILADANLDKVLSAYNKHRDKPIREQAENIIHLFTLTNLGAPAAFKYFDTTIDRKRYTSTKEVLDATLIHQSITGLYETRIDLSQLGGDGGGSSEAAAKPAPGGTAPLEEEYRLFLEAPIQNVTLLEQWKREIPKVWAEINPPGLASTQAPIHVQLLSTALPVRVRQYPITLEAKRSLRETIRKFRAAGILRPVHSPWNTPLLPVRKSGTSEYRMVQDLREVNKRVETIHPTVPNPYTLLSLLPPDRIWYSVLDLKDAFFCIPLAPESQLIFAFEWADAEEGESGQLTWTRLPQGFKNSPTLFNEALNRDLQGFRLDHPSVSLLQYVDDLLIAADTQAACLSATRDLLMTLAELGYRVSGKKAQLCQEEVTYLGFKIHKGSRSLSNSRTQAILQIPVPKTKRQVREFLGTIGYCRLWIPGFAELAQPLYAATRPGNDPLVWGEKEEEAFQSLKLALTQPPALALPSLDKPFQLFVEETSGAAKGVLTQALGPWKRPVAYLSKRLDPVAAGWPRCLRAIAAAALLTREASKLTFGQDIEITSSHNLESLLRSPPDKWLTNARITQYQVLLLDPPRVRFKQTAALNPATLLPETDDTLPIHHCLDTLDSLTSTRPDLTDQPLAQAEATLFTDGSSYIRDGKRYAGAAVVTLDSVIWAEPLPIGTSAQKAELIALTKALEWSKDKSVNIYTDSRYAFATLHVHGMIYRERGWLTAGGKAIKNAPEILALLTAVWLPKRVAVMHCKGHQKDDAPTSTGNRRADEVAREVAIRPLSTQATISAGKRTADGSEFEKRTADGSEFESPKKKAKVE

SEQ ID NO: 7570 - protein, 2102 aa, synthetic construct
MPAAKRVKLDGGDKKYSIGLDIGTNSVGWAVITDEYKVPSKKFKVLGNTDRHSIKKNLIGALLFDSGETAEATRLKRTARRRYTRRKNRICYLQEIFSNEMAKVDDSFFHRLEESFLVEEDKKHERHPIFGNIVDEVAYHEKYPTIYHLRKKLVDSTDKADLRLIYLALAHMIKFRGHFLIEGDLNPDNSDVDKLFIQLVQTYNQLFEENPINASGVDAKAILSARLSKSRRLENLIAQLPGEKKNGLFGNLIALSLGLTPNFKSNFDLAEDAKLQLSKDTYDDDLDNLLAQIGDQYADLFLAAKNLSDAILLSDILRVNTEITKAPLSASMIKRYDEHHQDLTLLKALVRQQLPEKYKEIFFDQSKNGYAGYIDGGASQEEFYKFIKPILEKMDGTEELLVKLNREDLLRKQRTFDNGSIPHQIHLGELHAILRRQEDFYPFLKDNREKIEKILTFRIPYYVGPLARGNSRFAWMTRKSEETITPWNFEEVVDKGASAQSFIERMTNFDKNLPNEKVLPKHSLLYEYFTVYNELTKVKYVTEGMRKPAFLSGEQKKAIVDLLFKTNRKVTVKQLKEDYFKKIECFDSVEISGVEDRFNASLGTYHDLLKIIKDKDFLDNEENEDILEDIVLTLTLFEDREMIEERLKTYAHLFDDKVMKQLKRRRYTGWGRLSRKLINGIRDKQSGKTILDFLKSDGFANRNFMQLIHDDSLTFKEDIQKAQVSGQGDSLHEHIANLAGSPAIKKGILQTVKVVDELVKVMGRHKPENIVIEMARENQTTQKGQKNSRERMKRIEEGIKELGSQILKEHPVENTQLQNEKLYLYYLQNGRDMYVDQELDINRLSDYDVDHIVPQSFLKDDSIDNKVLTRSDKARGKSDNVPSEEVVKKMKNYWRQLLNAKLITQRKFDNLTKAERGGLSELDKAGFIKRQLVETRQITKHVAQILDSRMNTKYDENDKLIREVKVITLKSKLVSDFRKDFQFYKVREINNYHHAHDAYLNAVVGTALIKKYPKLESEFVYGDYKVYDVRKMIAKSEQEIGKATAKYFFYSNIMNFFKTEITLANGEIRKRPLIETNGETGEIVWDKGRDFATVRKVLSMPQVNIVKKTEVQTGGFSKESILPKRNSDKLIARKKDWDPKKYGGFDSPTVAYSVLVVAKVEKGKSKKLKSVKELLGITIMERSSFEKNPIDFLEAKGYKEVKKDLIIKLPKYSLFELENGRKRMLASAGELQKGNELALPSKYVNFLYLASHYEKLKGSPEDNEQKQLFVEQHKHYLDEIIEQISEFSKRVILADANLDKVLSAYNKHRDKPIREQAENIIHLFTLTNLGAPAAFKYFDTTIDRKRYTSTKEVLDATLIHQSITGLYETRIDLSQLGGDGGGSSEAAAKPAPGGTVSLQDEHRLFDIPVTTSLPDVWLQDFPQAWAETGGLGRAKCQAPIIIDLKPTAVPVSIKQYPMSLEAHMGIRQHIIKFLELGVLRPCRSPWNTPLLPVKKPGTQDYRPVQDLREINKRTVDIHPTVPNPYNLLSTLKPDYSWYTVLDLKDAFFCLPLAPQSQELFAFEWKDPERGISGQLTWTRLPQGFKNSPTLFNEALHRDLTDFRTQHPEVTLLQYVDDLLLAAPTKKACTQGTRHLLQELGEKGYRASAKKAQICQTKVTYLGYILSEGKRWLTPGRIETVARIPPPRNPREVREFLGTAGFCRLWIPGFAELAAPLYALTKPSTPFTWQTEHQLAFEALKKALLSAPALGLPDTSKPFTLFLDERQGIAKGVLTQKLGPWKRPVAYLSKKLDPVAAGWPPCLRIMAATAMLVKDSAKLTLGQPLTVITPHTLEAIVRQPPDRWITNARLTHYQALLLDTDRVQFGPPVTLNPATLLPVPENQPSPHDCRQVLAETHGTREDLKDQELPDADHTWYTDGSSYLDSGTRRAGAAVVDGHNTIWAQSLPPGTSAQKAELIALTKALELSKGKKANIYTDSRYAFATAHTHGSIYERRGWLTSEGKEIKNKAEIIALLKALFLPQEVAIIHCPGHQKGQDPVAVGNRQADRVARQAAMAEVLTLATEPDNTSHITAGKRTADGSEFEKRTADGSEFESPKKKAKVE

SEQ ID NO: 7571 - protein, 2173 aa, synthetic construct
MPAAKRVKLDGGDKKYSIGLDIGTNSVGWAVITDEYKVPSKKFKVLGNTDRHSIKKNLIGALLFDSGETAEATRLKRTARRRYTRRKNRICYLQEIFSNEMAKVDDSFFHRLEESFLVEEDKKHERHPIFGNIVDEVAYHEKYPTIYHLRKKLVDSTDKADLRLIYLALAHMIKFRGHFLIEGDLNPDNSDVDKLFIQLVQTYNQLFEENPINASGVDAKAILSARLSKSRRLENLIAQLPGEKKNGLFGNLIALSLGLTPNFKSNFDLAEDAKLQLSKDTYDDDLDNLLAQIGDQYADLFLAAKNLSDAILLSDILRVNTEITKAPLSASMIKRYDEHHQDLTLLKALVRQQLPEKYKEIFFDQSKNGYAGYIDGGASQEEFYKFIKPILEKMDGTEELLVKLNREDLLRKQRTFDNGSIPHQIHLGELHAILRRQEDFYPFLKDNREKIEKILTFRIPYYVGPLARGNSRFAWMTRKSEETITPWNFEEVVDKGASAQSFIERMTNFDKNLPNEKVLPKHSLLYEYFTVYNELTKVKYVTEGMRKPAFLSGEQKKAIVDLLFKTNRKVTVKQLKEDYFKKIECFDSVEISGVEDRFNASLGTYHDLLKIIKDKDFLDNEENEDILEDIVLTLTLFEDREMIEERLKTYAHLFDDKVMKQLKRRRYTGWGRLSRKLINGIRDKQSGKTILDFLKSDGFANRNFMQLIHDDSLTFKEDIQKAQVSGQGDSLHEHIANLAGSPAIKKGILQTVKVVDELVKVMGRHKPENIVIEMARENQTTQKGQKNSRERMKRIEEGIKELGSQILKEHPVENTQLQNEKLYLYYLQNGRDMYVDQELDINRLSDYDVDHIVPQSFLKDDSIDNKVLTRSDKARGKSDNVPSEEVVKKMKNYWRQLLNAKLITQRKFDNLTKAERGGLSELDKAGFIKRQLVETRQITKHVAQILDSRMNTKYDENDKLIREVKVITLKSKLVSDFRKDFQFYKVREINNYHHAHDAYLNAVVGTALIKKYPKLESEFVYGDYKVYDVRKMIAKSEQEIGKATAKYFFYSNIMNFFKTEITLANGEIRKRPLIETNGETGEIVWDKGRDFATVRKVLSMPQVNIVKKTEVQTGGFSKESILPKRNSDKLIARKKDWDPKKYGGFDSPTVAYSVLVVAKVEKGKSKKLKSVKELLGITIMERSSFEKNPIDFLEAKGYKEVKKDLIIKLPKYSLFELENGRKRMLASAGELQKGNELALPSKYVNFLYLASHYEKLKGSPEDNEQKQLFVEQHKHYLDEIIEQISEFSKRVILADANLDKVLSAYNKHRDKPIREQAENIIHLFTLTNLGAPAAFKYFDTTIDRKRYTSTKEVLDATLIHQSITGLYETRIDLSQLGGDGGGSSEAAAKPAPGGMDLLKPLTVERKGVKIKGYWNSQADITCVPKDLLQGEEPVRQQNVTTIHGTQEGDVYYVNLKIDGRRINTEVIGTTLDYAIITPGDVPWILKKPLELTIKLDLEEQQGTLLNNSILSKKGKEELKQLFEKYSALWQSWENQVGHRRIRPHKIATGTVKPTPQKQYHINPKAKPDIQIVINDLLKQGVLIQKESTMNTPVYPVPKPNGRWRMVLDYRAVNKVTPLIAVQNQHSYGILGSLFKGRYKTTIDLSNGFWAHPIVPEDYWITAFTWQGKQYCWTVLPQGFLNSPGLFNGDVVDLLQGIPNVEVYVDDVYISHDSEKEHLEYLDILFNRLKEAGYIISLKKSNIANSIVDFLGFQITNEGRGLTDTFKEKLENITAPTTLKQLQSILGLLNFARNFIPDFTELIAPLYALIPKSPKNYVPWQIEHSTTLETLITKLNGAEYLQGRKGDKTLIMKVNASYTTGYIRYYNEGEKKPISYVSIVFSKTELKFTELEKLLTTVHKGLLKALDLSMGQNIHVYSPIVSMQNIQKTPQTAKKALASRWLSWLSYLEDPRIRFFYDPQMPALKDLPAVDTGKDNKKHPSNFQHIFYTDGSAITSPTKEGHLNAGMGIVYFINKDGNLQKQQEWSISLGNHTAQFAEIAAFEFALKKCLPLGGNILVVTDSNYVAKAYNEELDVWASNGFVNNRKKPLKHISKWKSVADLKRLRPDVVVTHEPGHQKLDSSPHAYGNNLADQLATQASFKVHAGKRTADGSEFEKRTADGSEFESPKKKAKVE

SEQ ID NO: 7572 - protein, 2095 aa, synthetic construct
MPAAKRVKLDGGDKKYSIGLDIGTNSVGWAVITDEYKVPSKKFKVLGNTDRHSIKKNLIGALLFDSGETAEATRLKRTARRRYTRRKNRICYLQEIFSNEMAKVDDSFFHRLEESFLVEEDKKHERHPIFGNIVDEVAYHEKYPTIYHLRKKLVDSTDKADLRLIYLALAHMIKFRGHFLIEGDLNPDNSDVDKLFIQLVQTYNQLFEENPINASGVDAKAILSARLSKSRRLENLIAQLPGEKKNGLFGNLIALSLGLTPNFKSNFDLAEDAKLQLSKDTYDDDLDNLLAQIGDQYADLFLAAKNLSDAILLSDILRVNTEITKAPLSASMIKRYDEHHQDLTLLKALVRQQLPEKYKEIFFDQSKNGYAGYIDGGASQEEFYKFIKPILEKMDGTEELLVKLNREDLLRKQRTFDNGSIPHQIHLGELHAILRRQEDFYPFLKDNREKIEKILTFRIPYYVGPLARGNSRFAWMTRKSEETITPWNFEEVVDKGASAQSFIERMTNFDKNLPNEKVLPKHSLLYEYFTVYNELTKVKYVTEGMRKPAFLSGEQKKAIVDLLFKTNRKVTVKQLKEDYFKKIECFDSVEISGVEDRFNASLGTYHDLLKIIKDKDFLDNEENEDILEDIVLTLTLFEDREMIEERLKTYAHLFDDKVMKQLKRRRYTGWGRLSRKLINGIRDKQSGKTILDFLKSDGFANRNFMQLIHDDSLTFKEDIQKAQVSGQGDSLHEHIANLAGSPAIKKGILQTVKVVDELVKVMGRHKPENIVIEMARENQTTQKGQKNSRERMKRIEEGIKELGSQILKEHPVENTQLQNEKLYLYYLQNGRDMYVDQELDINRLSDYDVDHIVPQSFLKDDSIDNKVLTRSDKARGKSDNVPSEEVVKKMKNYWRQLLNAKLITQRKFDNLTKAERGGLSELDKAGFIKRQLVETRQITKHVAQILDSRMNTKYDENDKLIREVKVITLKSKLVSDFRKDFQFYKVREINNYHHAHDAYLNAVVGTALIKKYPKLESEFVYGDYKVYDVRKMIAKSEQEIGKATAKYFFYSNIMNFFKTEITLANGEIRKRPLIETNGETGEIVWDKGRDFATVRKVLSMPQVNIVKKTEVQTGGFSKESILPKRNSDKLIARKKDWDPKKYGGFDSPTVAYSVLVVAKVEKGKSKKLKSVKELLGITIMERSSFEKNPIDFLEAKGYKEVKKDLIIKLPKYSLFELENGRKRMLASAGELQKGNELALPSKYVNFLYLASHYEKLKGSPEDNEQKQLFVEQHKHYLDEIIEQISEFSKRVILADANLDKVLSAYNKHRDKPIREQAENIIHLFTLTNLGAPAAFKYFDTTIDRKRYTSTKEVLDATLIHQSITGLYETRIDLSQLGGDGGGSSEAAAKPAPGGTLQLEEEYRLFEPESTQKQEMDIWLKNFPQAWAETGGMGTAHCQAPVLIQLKATATPISIRQYPMPHEAYQGIKPHIRRMLDQGILKPCQSPWNTPLLPVKKPGTEDYRPVQDLREVNKRVEDIHPTVPNPYNLLSTLPPSHPWYTVLDLKDAFFCLRLHSESQLLFAFEWRDPEIGLSGQLTWTRLPQGFKNSPTLFNEALHSDLADFRVRYPALVLLQYVDDLLLAAATRTECLEGTKALLETLGNKGYRASAKKAQICLQEVTYLGYSLKDGQRWLTKARKEAILSIPVPKNSRQVREFLGTAGYCRLWIPGFAELAAPLYPLTRPGTLFQWGTEQQLAFEDIKKALLSSPALGLPDITKPFELFIDENSGFAKGVLVQKLGPWKRPVAYLSKKLDTVASGWPPCLRMVAAIAILVKDAGKLTLGQPLTILTSHPVEALVRQPPNKWLSNARMTHYQAMLLDAERVHFGPTVSLNPATLLPLPSGGNHHDCLQILAETHGTRPDLTDQPLPDADLTWYTDGSSFIRNGEREAGAAVTTESEVIWAAPLPPGTSAQRAELIALTQALKMAEGKKLTVYTDSRYAFATTHVHGEIYRRRGWLTSEGKEIKNKNEILALLEALFLPKRLSIIHCPGHQKGDSPQAKGNRLADDTAKKAATETHSSLTVLPAGKRTADGSEFEKRTADGSEFESPKKKAKVE

SEQ ID NO: 7573 - protein, 2087 aa, synthetic construct
MPAAKRVKLDGGDKKYSIGLDIGTNSVGWAVITDEYKVPSKKFKVLGNTDRHSIKKNLIGALLFDSGETAEATRLKRTARRRYTRRKNRICYLQEIFSNEMAKVDDSFFHRLEESFLVEEDKKHERHPIFGNIVDEVAYHEKYPTIYHLRKKLVDSTDKADLRLIYLALAHMIKFRGHFLIEGDLNPDNSDVDKLFIQLVQTYNQLFEENPINASGVDAKAILSARLSKSRRLENLIAQLPGEKKNGLFGNLIALSLGLTPNFKSNFDLAEDAKLQLSKDTYDDDLDNLLAQIGDQYADLFLAAKNLSDAILLSDILRVNTEITKAPLSASMIKRYDEHHQDLTLLKALVRQQLPEKYKEIFFDQSKNGYAGYIDGGASQEEFYKFIKPILEKMDGTEELLVKLNREDLLRKQRTFDNGSIPHQIHLGELHAILRRQEDFYPFLKDNREKIEKILTFRIPYYVGPLARGNSRFAWMTRKSEETITPWNFEEVVDKGASAQSFIERMTNFDKNLPNEKVLPKHSLLYEYFTVYNELTKVKYVTEGMRKPAFLSGEQKKAIVDLLFKTNRKVTVKQLKEDYFKKIECFDSVEISGVEDRFNASLGTYHDLLKIIKDKDFLDNEENEDILEDIVLTLTLFEDREMIEERLKTYAHLFDDKVMKQLKRRRYTGWGRLSRKLINGIRDKQSGKTILDFLKSDGFANRNFMQLIHDDSLTFKEDIQKAQVSGQGDSLHEHIANLAGSPAIKKGILQTVKVVDELVKVMGRHKPENIVIEMARENQTTQKGQKNSRERMKRIEEGIKELGSQILKEHPVENTQLQNEKLYLYYLQNGRDMYVDQELDINRLSDYDVDHIVPQSFLKDDSIDNKVLTRSDKARGKSDNVPSEEVVKKMKNYWRQLLNAKLITQRKFDNLTKAERGGLSELDKAGFIKRQLVETRQITKHVAQILDSRMNTKYDENDKLIREVKVITLKSKLVSDFRKDFQFYKVREINNYHHAHDAYLNAVVGTALIKKYPKLESEFVYGDYKVYDVRKMIAKSEQEIGKATAKYFFYSNIMNFFKTEITLANGEIRKRPLIETNGETGEIVWDKGRDFATVRKVLSMPQVNIVKKTEVQTGGFSKESILPKRNSDKLIARKKDWDPKKYGGFDSPTVAYSVLVVAKVEKGKSKKLKSVKELLGITIMERSSFEKNPIDFLEAKGYKEVKKDLIIKLPKYSLFELENGRKRMLASAGELQKGNELALPSKYVNFLYLASHYEKLKGSPEDNEQKQLFVEQHKHYLDEIIEQISEFSKRVILADANLDKVLSAYNKHRDKPIREQAENIIHLFTLTNLGAPAAFKYFDTTIDRKRYTSTKEVLDATLIHQSITGLYETRIDLSQLGGDGGGSSEAAAKPAPGGVPWLTQQPLQLTILVPLQEYQEKILSKTALPEDQKQQLKTLFVKYDNLWQHWENQVGHRKIRPHNIATGDYPPRPQKQYPINPKAKPSIQIVIDDLLKQGVLTPQNSTMNTPVYPVPKPDGRWRMVLDYREVNKTIPLTAAQNQHSAGILATIVRQKYKTTLDLANGFWAHPITPESYWLTAFTWQGKQYCWTRLPQGFLNSPALFNADVVDLLKEIPNVQVYVDDIYLSHDDPKEHVQQLEKVFQILLQAGYVVSLKKSEIGQKTVEFLGFNITKEGRGLTDTFKTKLLNITPPKDLKQLQSILGKLNFARNFIPNFAELVQPLYNLIAPAKGKYIEWSEENTKQLNMVIEALNTASNLEERLPEQRLVIKVNTSPSAGYVRYYNETGKKPIMYLNYVFSKAELKFSMLEKLLTTMHKALIKAMDLAMGQEILVYSPIVSMTKIQKTPLPERKALPIRWITWMTYLEDPRIQFHYDKTLPELKHIPDVYTSSQSPVKHPSQYEGVFYTDGSAIKSPDPTKSNNAGMGIVHATYKPEYQVLNQWSIPLGNHTAQMAEIAAVEFACKKALKIPGPVLVITDSFYVAESANKELPYWKSNGFVNNKKKPLKHISKWKSIAECLSMKPDITIQHEKGISLQIPVFILKGNALADKLATQGSYVVNAGKRTADGSEFEKRTADGSEFESPKKKAKVE

SEQ ID NO: 7574 - protein, 2127 aa, synthetic construct
MPAAKRVKLDGGDKKYSIGLDIGTNSVGWAVITDEYKVPSKKFKVLGNTDRHSIKKNLIGALLFDSGETAEATRLKRTARRRYTRRKNRICYLQEIFSNEMAKVDDSFFHRLEESFLVEEDKKHERHPIFGNIVDEVAYHEKYPTIYHLRKKLVDSTDKADLRLIYLALAHMIKFRGHFLIEGDLNPDNSDVDKLFIQLVQTYNQLFEENPINASGVDAKAILSARLSKSRRLENLIAQLPGEKKNGLFGNLIALSLGLTPNFKSNFDLAEDAKLQLSKDTYDDDLDNLLAQIGDQYADLFLAAKNLSDAILLSDILRVNTEITKAPLSASMIKRYDEHHQDLTLLKALVRQQLPEKYKEIFFDQSKNGYAGYIDGGASQEEFYKFIKPILEKMDGTEELLVKLNREDLLRKQRTFDNGSIPHQIHLGELHAILRRQEDFYPFLKDNREKIEKILTFRIPYYVGPLARGNSRFAWMTRKSEETITPWNFEEVVDKGASAQSFIERMTNFDKNLPNEKVLPKHSLLYEYFTVYNELTKVKYVTEGMRKPAFLSGEQKKAIVDLLFKTNRKVTVKQLKEDYFKKIECFDSVEISGVEDRFNASLGTYHDLLKIIKDKDFLDNEENEDILEDIVLTLTLFEDREMIEERLKTYAHLFDDKVMKQLKRRRYTGWGRLSRKLINGIRDKQSGKTILDFLKSDGFANRNFMQLIHDDSLTFKEDIQKAQVSGQGDSLHEHIANLAGSPAIKKGILQTVKVVDELVKVMGRHKPENIVIEMARENQTTQKGQKNSRERMKRIEEGIKELGSQILKEHPVENTQLQNEKLYLYYLQNGRDMYVDQELDINRLSDYDVDHIVPQSFLKDDSIDNKVLTRSDKARGKSDNVPSEEVVKKMKNYWRQLLNAKLITQRKFDNLTKAERGGLSELDKAGFIKRQLVETRQITKHVAQILDSRMNTKYDENDKLIREVKVITLKSKLVSDFRKDFQFYKVREINNYHHAHDAYLNAVVGTALIKKYPKLESEFVYGDYKVYDVRKMIAKSEQEIGKATAKYFFYSNIMNFFKTEITLANGEIRKRPLIETNGETGEIVWDKGRDFATVRKVLSMPQVNIVKKTEVQTGGFSKESILPKRNSDKLIARKKDWDPKKYGGFDSPTVAYSVLVVAKVEKGKSKKLKSVKELLGITIMERSSFEKNPIDFLEAKGYKEVKKDLIIKLPKYSLFELENGRKRMLASAGELQKGNELALPSKYVNFLYLASHYEKLKGSPEDNEQKQLFVEQHKHYLDEIIEQISEFSKRVILADANLDKVLSAYNKHRDKPIREQAENIIHLFTLTNLGAPAAFKYFDTTIDRKRYTSTKEVLDATLIHQSITGLYETRIDLSQLGGDGGGSSEAAAKPAPGGLLGRDLLTKLKAQIQFSTEGPQVTWEDRPAMCLVLNLEEEYRLHEKPVPPSIDPSWLQLFPMVWAEKAGMGLANQVPPVVVELKSDASPVAVRQYPMSKEAREGIRPHIQRFLDLGILVPCQSPWNTPLLPVKKPGTNDYRPVQDLREVNKRVQDIHPTVPNPYNLLSSLPPSHTWYSVLDLKDAFFCLKLHPNSQPLFAFEWRDPEKGNTGQLTWTRLPQGFKNSPTLFNEALHRDLASFRALNPQVVMLQYVDDLLVAAPTYRDCKEGTRRLLQELSKLGYRVSAKKAQLCREEVTYLGYLLKGGKRWLTPARKATVMKIPTPTTPRQVREFLGTAGFCRLWIPGFASLAAPLYPLTRPKVPFTWTEAHQEAFGRIKEALLSAPALALPDLTKPFALYVDEKEGVARGVLTQTLGPWRRPVAYLSKKLDPVASGWPTCLKAIAAVALLLKDADKLTLGQNVLVIAPHNLESIVRQPPDRWMTNARMTHYQSLLLNERVSFAPPAILNPATLLPVESDDTPIHICSEILAEETGTRPDLRDQPLPGVPAWYTDGSSFIMDGRRQAGAAIVDNKRTVWASNLPEGTSAQKAELIALTQALRLAEGKSINIYTDSRYAFATAHVHGAIYKQRGWLTSAGKDIKNKEEILALLEAIHLPKRVAIIHCPGHQRGTDPVATGNRKADEAAKQAAQSTRILTETTKNAGKRTADGSEFEKRTADGSEFESPKKKAKVE

SEQ ID NO: 7575 - protein, 2218 aa, synthetic construct
MPAAKRVKLDGGDKKYSIGLDIGTNSVGWAVITDEYKVPSKKFKVLGNTDRHSIKKNLIGALLFDSGETAEATRLKRTARRRYTRRKNRICYLQEIFSNEMAKVDDSFFHRLEESFLVEEDKKHERHPIFGNIVDEVAYHEKYPTIYHLRKKLVDSTDKADLRLIYLALAHMIKFRGHFLIEGDLNPDNSDVDKLFIQLVQTYNQLFEENPINASGVDAKAILSARLSKSRRLENLIAQLPGEKKNGLFGNLIALSLGLTPNFKSNFDLAEDAKLQLSKDTYDDDLDNLLAQIGDQYADLFLAAKNLSDAILLSDILRVNTEITKAPLSASMIKRYDEHHQDLTLLKALVRQQLPEKYKEIFFDQSKNGYAGYIDGGASQEEFYKFIKPILEKMDGTEELLVKLNREDLLRKQRTFDNGSIPHQIHLGELHAILRRQEDFYPFLKDNREKIEKILTFRIPYYVGPLARGNSRFAWMTRKSEETITPWNFEEVVDKGASAQSFIERMTNFDKNLPNEKVLPKHSLLYEYFTVYNELTKVKYVTEGMRKPAFLSGEQKKAIVDLLFKTNRKVTVKQLKEDYFKKIECFDSVEISGVEDRFNASLGTYHDLLKIIKDKDFLDNEENEDILEDIVLTLTLFEDREMIEERLKTYAHLFDDKVMKQLKRRRYTGWGRLSRKLINGIRDKQSGKTILDFLKSDGFANRNFMQLIHDDSLTFKEDIQKAQVSGQGDSLHEHIANLAGSPAIKKGILQTVKVVDELVKVMGRHKPENIVIEMARENQTTQKGQKNSRERMKRIEEGIKELGSQILKEHPVENTQLQNEKLYLYYLQNGRDMYVDQELDINRLSDYDVDHIVPQSFLKDDSIDNKVLTRSDKARGKSDNVPSEEVVKKMKNYWRQLLNAKLITQRKFDNLTKAERGGLSELDKAGFIKRQLVETRQITKHVAQILDSRMNTKYDENDKLIREVKVITLKSKLVSDFRKDFQFYKVREINNYHHAHDAYLNAVVGTALIKKYPKLESEFVYGDYKVYDVRKMIAKSEQEIGKATAKYFFYSNIMNFFKTEITLANGEIRKRPLIETNGETGEIVWDKGRDFATVRKVLSMPQVNIVKKTEVQTGGFSKESILPKRNSDKLIARKKDWDPKKYGGFDSPTVAYSVLVVAKVEKGKSKKLKSVKELLGITIMERSSFEKNPIDFLEAKGYKEVKKDLIIKLPKYSLFELENGRKRMLASAGELQKGNELALPSKYVNFLYLASHYEKLKGSPEDNEQKQLFVEQHKHYLDEIIEQISEFSKRVILADANLDKVLSAYNKHRDKPIREQAENIIHLFTLTNLGAPAAFKYFDTTIDRKRYTSTKEVLDATLIHQSITGLYETRIDLSQLGGDGGGSSEAAAKPAPGGTLGDQGSRGSDPLPEPRVTLTVEGIPTEFLVNTGAEHSVLTKPMGKMGSKRTVVAGATGSKVYPWTTKRLLKIGQKQVTHSFLVIPECPAPLLGRDLLTKLKAQIQFSTEGPQVTWEDRPAMCLVLNLEEEYRLHEKPVPPSIDPSWLQLFPMVWAEKAGMGLANQVPPVVVELKSDASPVAVRQYPMSKEAREGIRPHIQRFLDLGILVPCQSPWNTPLLPVKKPGTNDYRPVQDLREVNKRVQDIHPTVPNPYNLLSSLPPSHTWYSVLDLKDAFFCLKLHPNSQPLFAFEWRDPEKGNTGQLTWTRLPQGFKNSPTLFNEALHRDLASFRALNPQVVMLQYVDDLLVAAPTYRDCKEGTRRLLQELSKLGYRVSAKKAQLCREEVTYLGYLLKGGKRWLTPARKATVMKIPTPTTPRQVREFLGTAGFCRLWIPGFASLAAPLYPLTRPKVPFTWTEAHQEAFGRIKEALLSAPALALPDLTKPFALYVDEKEGVARGVLTQTLGPWRRPVAYLSKKLDPVASGWPTCLKAIAAVALLLKDADKLTLGQNVLVIAPHNLESIVRQPPDRWMTNARMTHYQSLLLNERVSFAPPAILNPATLLPVESDDTPIHICSEILAEETGTRPDLRDQPLPGVPAWYTDGSSFIMDGRRQAGAAIVDNKRTVWASNLPEGTSAQKAELIALTQALRLAEGKSINIYTDSRYAFATAHVHGAIYKQRGWLTSAGKDIKNKEEILALLEAIHLPKRVAIIHCPGHQRGTDPVATGNRKADEAAKQAAQSTRILTETTKNAGKRTADGSEFEKRTADGSEFESPKKKAKVE

SEQ ID NO: 7576 - protein, 2218 aa, synthetic construct
MPAAKRVKLDGGDKKYSIGLDIGTNSVGWAVITDEYKVPSKKFKVLGNTDRHSIKKNLIGALLFDSGETAEATRLKRTARRRYTRRKNRICYLQEIFSNEMAKVDDSFFHRLEESFLVEEDKKHERHPIFGNIVDEVAYHEKYPTIYHLRKKLVDSTDKADLRLIYLALAHMIKFRGHFLIEGDLNPDNSDVDKLFIQLVQTYNQLFEENPINASGVDAKAILSARLSKSRRLENLIAQLPGEKKNGLFGNLIALSLGLTPNFKSNFDLAEDAKLQLSKDTYDDDLDNLLAQIGDQYADLFLAAKNLSDAILLSDILRVNTEITKAPLSASMIKRYDEHHQDLTLLKALVRQQLPEKYKEIFFDQSKNGYAGYIDGGASQEEFYKFIKPILEKMDGTEELLVKLNREDLLRKQRTFDNGSIPHQIHLGELHAILRRQEDFYPFLKDNREKIEKILTFRIPYYVGPLARGNSRFAWMTRKSEETITPWNFEEVVDKGASAQSFIERMTNFDKNLPNEKVLPKHSLLYEYFTVYNELTKVKYVTEGMRKPAFLSGEQKKAIVDLLFKTNRKVTVKQLKEDYFKKIECFDSVEISGVEDRFNASLGTYHDLLKIIKDKDFLDNEENEDILEDIVLTLTLFEDREMIEERLKTYAHLFDDKVMKQLKRRRYTGWGRLSRKLINGIRDKQSGKTILDFLKSDGFANRNFMQLIHDDSLTFKEDIQKAQVSGQGDSLHEHIANLAGSPAIKKGILQTVKVVDELVKVMGRHKPENIVIEMARENQTTQKGQKNSRERMKRIEEGIKELGSQILKEHPVENTQLQNEKLYLYYLQNGRDMYVDQELDINRLSDYDVDHIVPQSFLKDDSIDNKVLTRSDKARGKSDNVPSEEVVKKMKNYWRQLLNAKLITQRKFDNLTKAERGGLSELDKAGFIKRQLVETRQITKHVAQILDSRMNTKYDENDKLIREVKVITLKSKLVSDFRKDFQFYKVREINNYHHAHDAYLNAVVGTALIKKYPKLESEFVYGDYKVYDVRKMIAKSEQEIGKATAKYFFYSNIMNFFKTEITLANGEIRKRPLIETNGETGEIVWDKGRDFATVRKVLSMPQVNIVKKTEVQTGGFSKESILPKRNSDKLIARKKDWDPKKYGGFDSPTVAYSVLVVAKVEKGKSKKLKSVKELLGITIMERSSFEKNPIDFLEAKGYKEVKKDLIIKLPKYSLFELENGRKRMLASAGELQKGNELALPSKYVNFLYLASHYEKLKGSPEDNEQKQLFVEQHKHYLDEIIEQISEFSKRVILADANLDKVLSAYNKHRDKPIREQAENIIHLFTLTNLGAPAAFKYFDTTIDRKRYTSTKEVLDATLIHQSITGLYETRIDLSQLGGDGGGSSEAAAKPAPGGTLGDQGSRGSDPLPEPRVTLTVEGIPTEFLVNTGAEHSVLTKPMGKMGSKRTVVAGATGSKVYPWTTKRLLKIGQKQVTHSFLVIPECPAPLLGRDLLTKLKAQIQFSTEGPQVTWEDRPAMCLVLNLEEEYRLHEKPVPPSIDPSWLQLFPMVWAEKAGMGLANQVPPVVVELKSDASPVAVRQYPMSKEAREGIRPHIQRFLDLGILVPCQSPWNTPLLPVKKPGTNDYRPVQDLREVNKRVQDIHPTVPNPYNLLSSLPPSHTWYSVLDLKDAFFCLKLHPNSQPLFAFEWRDPEKGNTGQLTWTRLPQGFKNSPTLFNEALHRDLASFRALNPQVVMLQYVDDLLVAAPTYRDCKEGTRRLLQELSKLGYRVSAKKAQLCREEVTYLGYLLKGGKRWLTPARKATVMKIPTPTTPRQVREFLGKAGFCRLFIPGFASLAAPLYPLTRPKVPFTWTEAHQEAFGRIKEALLSAPALALPDLTKPFALYVDEKEGVARGVLTQTLGPWRRPVAYLSKKLDPVASGWPTCLKAIAAVALLLKDADKLTLGQNVLVIAPHNLESIVRQPPDRWMTNARMTHYQSLLLNERVSFAPPAILNPATLLPVESDDTPIHICSEILAEETGTRPDLRDQPLPGVPAWYTDGSSFIMDGRRQAGAAIVDNKRTVWASNLPEGTSAQKAELIALTQALRLAEGKSINIYTDSRYAFATAHVHGAIYKQRGWLTSAGKDIKNKEEILALLEAIHLPKRVAIIHCPGHQRGTDPVATGNRKADEAAKQAAQSTRILTETTKNAGKRTADGSEFEKRTADGSEFESPKKKAKVE

SEQ ID NO: 7577 - protein, 2096 aa, synthetic construct
MPAAKRVKLDGGDKKYSIGLDIGTNSVGWAVITDEYKVPSKKFKVLGNTDRHSIKKNLIGALLFDSGETAEATRLKRTARRRYTRRKNRICYLQEIFSNEMAKVDDSFFHRLEESFLVEEDKKHERHPIFGNIVDEVAYHEKYPTIYHLRKKLVDSTDKADLRLIYLALAHMIKFRGHFLIEGDLNPDNSDVDKLFIQLVQTYNQLFEENPINASGVDAKAILSARLSKSRRLENLIAQLPGEKKNGLFGNLIALSLGLTPNFKSNFDLAEDAKLQLSKDTYDDDLDNLLAQIGDQYADLFLAAKNLSDAILLSDILRVNTEITKAPLSASMIKRYDEHHQDLTLLKALVRQQLPEKYKEIFFDQSKNGYAGYIDGGASQEEFYKFIKPILEKMDGTEELLVKLNREDLLRKQRTFDNGSIPHQIHLGELHAILRRQEDFYPFLKDNREKIEKILTFRIPYYVGPLARGNSRFAWMTRKSEETITPWNFEEVVDKGASAQSFIERMTNFDKNLPNEKVLPKHSLLYEYFTVYNELTKVKYVTEGMRKPAFLSGEQKKAIVDLLFKTNRKVTVKQLKEDYFKKIECFDSVEISGVEDRFNASLGTYHDLLKIIKDKDFLDNEENEDILEDIVLTLTLFEDREMIEERLKTYAHLFDDKVMKQLKRRRYTGWGRLSRKLINGIRDKQSGKTILDFLKSDGFANRNFMQLIHDDSLTFKEDIQKAQVSGQGDSLHEHIANLAGSPAIKKGILQTVKVVDELVKVMGRHKPENIVIEMARENQTTQKGQKNSRERMKRIEEGIKELGSQILKEHPVENTQLQNEKLYLYYLQNGRDMYVDQELDINRLSDYDVDHIVPQSFLKDDSIDNKVLTRSDKARGKSDNVPSEEVVKKMKNYWRQLLNAKLITQRKFDNLTKAERGGLSELDKAGFIKRQLVETRQITKHVAQILDSRMNTKYDENDKLIREVKVITLKSKLVSDFRKDFQFYKVREINNYHHAHDAYLNAVVGTALIKKYPKLESEFVYGDYKVYDVRKMIAKSEQEIGKATAKYFFYSNIMNFFKTEITLANGEIRKRPLIETNGETGEIVWDKGRDFATVRKVLSMPQVNIVKKTEVQTGGFSKESILPKRNSDKLIARKKDWDPKKYGGFDSPTVAYSVLVVAKVEKGKSKKLKSVKELLGITIMERSSFEKNPIDFLEAKGYKEVKKDLIIKLPKYSLFELENGRKRMLASAGELQKGNELALPSKYVNFLYLASHYEKLKGSPEDNEQKQLFVEQHKHYLDEIIEQISEFSKRVILADANLDKVLSAYNKHRDKPIREQAENIIHLFTLTNLGAPAAFKYFDTTIDRKRYTSTKEVLDATLIHQSITGLYETRIDLSQLGGDGGGSSEAAAKPAPGGTLNLEDEYRLYETSAEPEVSPGSTWLSDFPQAWAETGGMGLAVRQAPLIIPLKATSTPVSIKQYPMSQEAKLGIKPHIQRLLDQGILVPCQSPWNTPLLPVKKPGTNDYRPVQDLREVNKRVEDIHPTVPNPYNLLSGLPPSHRWYTVLDLKDAFFCLRLHPTSQPLFAFEWRDPGMGISGQLTWTRLPQGFKNSPTLFNEALHRDLADFRIQHPDLILLQYVDDILLAATSELDCQQGTRALLLTLGNLGYRASAKKAQLCQKQVKYLGYLLKEGQRWLTEARKETVMGQPTPKTPRQLREFLGTAGFCRLWIPGFAEMAAPLYPLTKPGTLFNWGPDQQKAYQEIKQALLTAPALGLPDLTKPFELFVDEKQGYAKGVLTQKLGPWRRPVAYLSKKLDPVAAGWPPCLRMVAAIAVLRKDAGKLTMGQPLVILAPHAVEALVKQPPDRWLSNARMTHYQAMLLDTDRVQFGPVVALNPATLLPLPEEGAPHDCLEILAETHGTRPDLTDQPIPDADHTWYTDGSSFLQEGQRKAGAAVTTETEVIWARALPAGTSAQRAELIALTQALKMAEGKRLNVYTDSRYAFATAHIHGEIYRRRGWLTSEGREIKNKSEILALLKALFLPKRLSIIHCLGHQKGDSAEARGNRLADQAAREAAIKTPPDTSTLLAGKRTADGSEFEKRTADGSEFESPKKKAKVE

SEQ ID NO: 7578 - protein, 2096 aa, synthetic construct
MPAAKRVKLDGGDKKYSIGLDIGTNSVGWAVITDEYKVPSKKFKVLGNTDRHSIKKNLIGALLFDSGETAEATRLKRTARRRYTRRKNRICYLQEIFSNEMAKVDDSFFHRLEESFLVEEDKKHERHPIFGNIVDEVAYHEKYPTIYHLRKKLVDSTDKADLRLIYLALAHMIKFRGHFLIEGDLNPDNSDVDKLFIQLVQTYNQLFEENPINASGVDAKAILSARLSKSRRLENLIAQLPGEKKNGLFGNLIALSLGLTPNFKSNFDLAEDAKLQLSKDTYDDDLDNLLAQIGDQYADLFLAAKNLSDAILLSDILRVNTEITKAPLSASMIKRYDEHHQDLTLLKALVRQQLPEKYKEIFFDQSKNGYAGYIDGGASQEEFYKFIKPILEKMDGTEELLVKLNREDLLRKQRTFDNGSIPHQIHLGELHAILRRQEDFYPFLKDNREKIEKILTFRIPYYVGPLARGNSRFAWMTRKSEETITPWNFEEVVDKGASAQSFIERMTNFDKNLPNEKVLPKHSLLYEYFTVYNELTKVKYVTEGMRKPAFLSGEQKKAIVDLLFKTNRKVTVKQLKEDYFKKIECFDSVEISGVEDRFNASLGTYHDLLKIIKDKDFLDNEENEDILEDIVLTLTLFEDREMIEERLKTYAHLFDDKVMKQLKRRRYTGWGRLSRKLINGIRDKQSGKTILDFLKSDGFANRNFMQLIHDDSLTFKEDIQKAQVSGQGDSLHEHIANLAGSPAIKKGILQTVKVVDELVKVMGRHKPENIVIEMARENQTTQKGQKNSRERMKRIEEGIKELGSQILKEHPVENTQLQNEKLYLYYLQNGRDMYVDQELDINRLSDYDVDHIVPQSFLKDDSIDNKVLTRSDKARGKSDNVPSEEVVKKMKNYWRQLLNAKLITQRKFDNLTKAERGGLSELDKAGFIKRQLVETRQITKHVAQILDSRMNTKYDENDKLIREVKVITLKSKLVSDFRKDFQFYKVREINNYHHAHDAYLNAVVGTALIKKYPKLESEFVYGDYKVYDVRKMIAKSEQEIGKATAKYFFYSNIMNFFKTEITLANGEIRKRPLIETNGETGEIVWDKGRDFATVRKVLSMPQVNIVKKTEVQTGGFSKESILPKRNSDKLIARKKDWDPKKYGGFDSPTVAYSVLVVAKVEKGKSKKLKSVKELLGITIMERSSFEKNPIDFLEAKGYKEVKKDLIIKLPKYSLFELENGRKRMLASAGELQKGNELALPSKYVNFLYLASHYEKLKGSPEDNEQKQLFVEQHKHYLDEIIEQISEFSKRVILADANLDKVLSAYNKHRDKPIREQAENIIHLFTLTNLGAPAAFKYFDTTIDRKRYTSTKEVLDATLIHQSITGLYETRIDLSQLGGDGGGSSEAAAKPAPGGTLNLEDEYRLYETSAEPEVSPGSTWLSDFPQAWAETGGMGLAVRQAPLIIPLKATSTPVSIKQYPMSQEAKLGIKPHIQRLLDQGILVPCQSPWNTPLLPVKKPGTNDYRPVQDLREVNKRVEDIHPTVPNPYNLLSGLPPSHRWYTVLDLKDAFFCLRLHPTSQPLFAFEWRDPGMGISGQLTWTRLPQGFKNSPTLFNEALHRDLADFRIQHPDLILLQYVDDILLAATSELDCQQGTRALLLTLGNLGYRASAKKAQLCQKQVKYLGYLLKEGQRWLTEARKETVMGQPTPKTPRQLREFLGKAGFCRLFIPGFAEMAAPLYPLTKPGTLFNWGPDQQKAYQEIKQALLTAPALGLPDLTKPFELFVDEKQGYAKGVLTQKLGPWRRPVAYLSKKLDPVAAGWPPCLRMVAAIAVLRKDAGKLTMGQPLVILAPHAVEALVKQPPDRWLSNARMTHYQAMLLDTDRVQFGPVVALNPATLLPLPEEGAPHDCLEILAETHGTRPDLTDQPIPDADHTWYTDGSSFLQEGQRKAGAAVTTETEVIWARALPAGTSAQRAELIALTQALKMAEGKRLNVYTDSRYAFATAHIHGEIYRRRGWLTSEGREIKNKSEILALLKALFLPKRLSIIHCLGHQKGDSAEARGNRLADQAAREAAIKTPPDTSTLLAGKRTADGSEFEKRTADGSEFESPKKKAKVE

SEQ ID NO: 7579 - protein, 2096 aa, synthetic construct
MPAAKRVKLDGGDKKYSIGLDIGTNSVGWAVITDEYKVPSKKFKVLGNTDRHSIKKNLIGALLFDSGETAEATRLKRTARRRYTRRKNRICYLQEIFSNEMAKVDDSFFHRLEESFLVEEDKKHERHPIFGNIVDEVAYHEKYPTIYHLRKKLVDSTDKADLRLIYLALAHMIKFRGHFLIEGDLNPDNSDVDKLFIQLVQTYNQLFEENPINASGVDAKAILSARLSKSRRLENLIAQLPGEKKNGLFGNLIALSLGLTPNFKSNFDLAEDAKLQLSKDTYDDDLDNLLAQIGDQYADLFLAAKNLSDAILLSDILRVNTEITKAPLSASMIKRYDEHHQDLTLLKALVRQQLPEKYKEIFFDQSKNGYAGYIDGGASQEEFYKFIKPILEKMDGTEELLVKLNREDLLRKQRTFDNGSIPHQIHLGELHAILRRQEDFYPFLKDNREKIEKILTFRIPYYVGPLARGNSRFAWMTRKSEETITPWNFEEVVDKGASAQSFIERMTNFDKNLPNEKVLPKHSLLYEYFTVYNELTKVKYVTEGMRKPAFLSGEQKKAIVDLLFKTNRKVTVKQLKEDYFKKIECFDSVEISGVEDRFNASLGTYHDLLKIIKDKDFLDNEENEDILEDIVLTLTLFEDREMIEERLKTYAHLFDDKVMKQLKRRRYTGWGRLSRKLINGIRDKQSGKTILDFLKSDGFANRNFMQLIHDDSLTFKEDIQKAQVSGQGDSLHEHIANLAGSPAIKKGILQTVKVVDELVKVMGRHKPENIVIEMARENQTTQKGQKNSRERMKRIEEGIKELGSQILKEHPVENTQLQNEKLYLYYLQNGRDMYVDQELDINRLSDYDVDHIVPQSFLKDDSIDNKVLTRSDKARGKSDNVPSEEVVKKMKNYWRQLLNAKLITQRKFDNLTKAERGGLSELDKAGFIKRQLVETRQITKHVAQILDSRMNTKYDENDKLIREVKVITLKSKLVSDFRKDFQFYKVREINNYHHAHDAYLNAVVGTALIKKYPKLESEFVYGDYKVYDVRKMIAKSEQEIGKATAKYFFYSNIMNFFKTEITLANGEIRKRPLIETNGETGEIVWDKGRDFATVRKVLSMPQVNIVKKTEVQTGGFSKESILPKRNSDKLIARKKDWDPKKYGGFDSPTVAYSVLVVAKVEKGKSKKLKSVKELLGITIMERSSFEKNPIDFLEAKGYKEVKKDLIIKLPKYSLFELENGRKRMLASAGELQKGNELALPSKYVNFLYLASHYEKLKGSPEDNEQKQLFVEQHKHYLDEIIEQISEFSKRVILADANLDKVLSAYNKHRDKPIREQAENIIHLFTLTNLGAPAAFKYFDTTIDRKRYTSTKEVLDATLIHQSITGLYETRIDLSQLGGDGGGSSEAAAKPAPGGTLGIEDEYRLHETSTEPDVSLGSTWLSDFPQAWAETGGMGLAVRQAPLIIPLKATSTPVSIQQYPMSHEARLGIKPHIQRLLDQGILVPCQSPWNTPLLPVKKPGTNDYRPVQDLREVNKRVEDIHPTVPNPYNLLSGLPPSHQWYTVLDLKDAFFCLRLHPTSQPLFAFEWRDPGMGISGQLTWTRLPQGFKNSPTLFDEALHRDLADFRIQHPDLILLQYVDDILLAATSELDCQQGTRALLQTLGDLGYRASAKKAQICQKQVKYLGYLLREGQRWLTEARKETVMGQPVPKTPRQLREFLGTAGFCRLWIPGFAEMAAPLYPLTKTGTLFSWGPDQQKAYQEIKQALLTAPALGLPDLTKPFELFVDEKQGYAKGVLTQKLGPWRRPVAYLSKKLDPVAAGWPPCLRMVAAIAVLTKDAGKLTMGQPLVILAPHAVEALVKQPPDRWLSNARMTHYQAMLLDTDRVQFGPVVALNPATLLPLPEEGAPHDCLEILAETHGTRPDLTDQPIPDADHTWYTDGSSFLQEGQRKAGAAVTTETEVIWAGALPAGTSAQRAELIALTQALKMAEGKRLNVYTDSRYAFATAHIHGEIYRRRGLLTSEGREIKNKSEILALLKALFLPKRLSIIHCLGHQKGDSAEARGNRLADQAAREAAIKTPPDTSTLLAGKRTADGSEFEKRTADGSEFESPKKKAKVE

SEQ ID NO: 7580 - protein, 2096 aa, synthetic construct
MPAAKRVKLDGGDKKYSIGLDIGTNSVGWAVITDEYKVPSKKFKVLGNTDRHSIKKNLIGALLFDSGETAEATRLKRTARRRYTRRKNRICYLQEIFSNEMAKVDDSFFHRLEESFLVEEDKKHERHPIFGNIVDEVAYHEKYPTIYHLRKKLVDSTDKADLRLIYLALAHMIKFRGHFLIEGDLNPDNSDVDKLFIQLVQTYNQLFEENPINASGVDAKAILSARLSKSRRLENLIAQLPGEKKNGLFGNLIALSLGLTPNFKSNFDLAEDAKLQLSKDTYDDDLDNLLAQIGDQYADLFLAAKNLSDAILLSDILRVNTEITKAPLSASMIKRYDEHHQDLTLLKALVRQQLPEKYKEIFFDQSKNGYAGYIDGGASQEEFYKFIKPILEKMDGTEELLVKLNREDLLRKQRTFDNGSIPHQIHLGELHAILRRQEDFYPFLKDNREKIEKILTFRIPYYVGPLARGNSRFAWMTRKSEETITPWNFEEVVDKGASAQSFIERMTNFDKNLPNEKVLPKHSLLYEYFTVYNELTKVKYVTEGMRKPAFLSGEQKKAIVDLLFKTNRKVTVKQLKEDYFKKIECFDSVEISGVEDRFNASLGTYHDLLKIIKDKDFLDNEENEDILEDIVLTLTLFEDREMIEERLKTYAHLFDDKVMKQLKRRRYTGWGRLSRKLINGIRDKQSGKTILDFLKSDGFANRNFMQLIHDDSLTFKEDIQKAQVSGQGDSLHEHIANLAGSPAIKKGILQTVKVVDELVKVMGRHKPENIVIEMARENQTTQKGQKNSRERMKRIEEGIKELGSQILKEHPVENTQLQNEKLYLYYLQNGRDMYVDQELDINRLSDYDVDHIVPQSFLKDDSIDNKVLTRSDKARGKSDNVPSEEVVKKMKNYWRQLLNAKLITQRKFDNLTKAERGGLSELDKAGFIKRQLVETRQITKHVAQILDSRMNTKYDENDKLIREVKVITLKSKLVSDFRKDFQFYKVREINNYHHAHDAYLNAVVGTALIKKYPKLESEFVYGDYKVYDVRKMIAKSEQEIGKATAKYFFYSNIMNFFKTEITLANGEIRKRPLIETNGETGEIVWDKGRDFATVRKVLSMPQVNIVKKTEVQTGGFSKESILPKRNSDKLIARKKDWDPKKYGGFDSPTVAYSVLVVAKVEKGKSKKLKSVKELLGITIMERSSFEKNPIDFLEAKGYKEVKKDLIIKLPKYSLFELENGRKRMLASAGELQKGNELALPSKYVNFLYLASHYEKLKGSPEDNEQKQLFVEQHKHYLDEIIEQISEFSKRVILADANLDKVLSAYNKHRDKPIREQAENIIHLFTLTNLGAPAAFKYFDTTIDRKRYTSTKEVLDATLIHQSITGLYETRIDLSQLGGDGGGSSEAAAKPAPGGTLNIEDEYRLHETSKEPDVSLGSTWLSDFPQAWAETGGMGLAVRQAPLIIPLKATSTPVSIKQYPMSQEARLGIKPHIQRLLDQGILVPCQSPWNTPLLPVKKPGTNDYRPVQDLREVNKRVEDIHPTVPNPYNLLSGLPPSHQWYTVLDLKDAFFCLRLHPTSQPLFAFEWRDPEMGISGQLTWTRLPQGFKNSPTLFNEALHRDLAGFRIQHPDLILLQYVDDLLLAATSELDCQQGTRALLQTLGDLGYRASAKKAQICQKQVKYLGYLLKEGQRWLTEARKETVMGQPIPKTPRQLREFLGTAGFCRLWIPGFAEMAAPLYPLTKPGTLFNWGPDQQKAFQEIKQALLTAPALGLPDLTKPFELFVDEKQGYAKGVLTQKLGPWRRPVAYLSKKLDPVAAGWPPCLRMVAAIAVLTKDAGKLTMGQPLVILAPHAVEALVKQPPDRWLSNARMTHYQALLLDTDRVQFGPVVALNPATLLPLPEEGLQHDCLDILAEAHGTRSDLMDQPLPDADHTWYTDGSSFLQEGQRKAGAAVTTETEVIWARALPAGTSAQRAELIALTQALKMAEGKKLNVYTDSRYAFATAHIHGEIYRRRGWLTSEGKEIKNKDEILALLKALFLPKRLSIIHCPGHQKGNSAEARGNRMADQAAREVATRETPETSTLLAGKRTADGSEFEKRTADGSEFESPKKKAKVE

SEQ ID NO: 7581 - protein, 2096 aa, synthetic construct
MPAAKRVKLDGGDKKYSIGLDIGTNSVGWAVITDEYKVPSKKFKVLGNTDRHSIKKNLIGALLFDSGETAEATRLKRTARRRYTRRKNRICYLQEIFSNEMAKVDDSFFHRLEESFLVEEDKKHERHPIFGNIVDEVAYHEKYPTIYHLRKKLVDSTDKADLRLIYLALAHMIKFRGHFLIEGDLNPDNSDVDKLFIQLVQTYNQLFEENPINASGVDAKAILSARLSKSRRLENLIAQLPGEKKNGLFGNLIALSLGLTPNFKSNFDLAEDAKLQLSKDTYDDDLDNLLAQIGDQYADLFLAAKNLSDAILLSDILRVNTEITKAPLSASMIKRYDEHHQDLTLLKALVRQQLPEKYKEIFFDQSKNGYAGYIDGGASQEEFYKFIKPILEKMDGTEELLVKLNREDLLRKQRTFDNGSIPHQIHLGELHAILRRQEDFYPFLKDNREKIEKILTFRIPYYVGPLARGNSRFAWMTRKSEETITPWNFEEVVDKGASAQSFIERMTNFDKNLPNEKVLPKHSLLYEYFTVYNELTKVKYVTEGMRKPAFLSGEQKKAIVDLLFKTNRKVTVKQLKEDYFKKIECFDSVEISGVEDRFNASLGTYHDLLKIIKDKDFLDNEENEDILEDIVLTLTLFEDREMIEERLKTYAHLFDDKVMKQLKRRRYTGWGRLSRKLINGIRDKQSGKTILDFLKSDGFANRNFMQLIHDDSLTFKEDIQKAQVSGQGDSLHEHIANLAGSPAIKKGILQTVKVVDELVKVMGRHKPENIVIEMARENQTTQKGQKNSRERMKRIEEGIKELGSQILKEHPVENTQLQNEKLYLYYLQNGRDMYVDQELDINRLSDYDVDHIVPQSFLKDDSIDNKVLTRSDKARGKSDNVPSEEVVKKMKNYWRQLLNAKLITQRKFDNLTKAERGGLSELDKAGFIKRQLVETRQITKHVAQILDSRMNTKYDENDKLIREVKVITLKSKLVSDFRKDFQFYKVREINNYHHAHDAYLNAVVGTALIKKYPKLESEFVYGDYKVYDVRKMIAKSEQEIGKATAKYFFYSNIMNFFKTEITLANGEIRKRPLIETNGETGEIVWDKGRDFATVRKVLSMPQVNIVKKTEVQTGGFSKESILPKRNSDKLIARKKDWDPKKYGGFDSPTVAYSVLVVAKVEKGKSKKLKSVKELLGITIMERSSFEKNPIDFLEAKGYKEVKKDLIIKLPKYSLFELENGRKRMLASAGELQKGNELALPSKYVNFLYLASHYEKLKGSPEDNEQKQLFVEQHKHYLDEIIEQISEFSKRVILADANLDKVLSAYNKHRDKPIREQAENIIHLFTLTNLGAPAAFKYFDTTIDRKRYTSTKEVLDATLIHQSITGLYETRIDLSQLGGDGGGSSEAAAKPAPGGTLNIEDEYRLHEISTEPDVSPGSTWLSDFPQAWAETGGMGLAVRQAPLIIPLKATSTPVSIKQYPMSQEAKLGIKPHIQRLLDQGILVPCQSPWNTPLLPVKKPGTNDYRPVQGLREVNKRVEDIHPTVPNPYNLLSGLPTSHRWYTVLDLKDAFFCLRLHPTSQPLFASEWRDPGMGISGQLTWTRLPQGFKNSPTLFNEALHRGLADFRIQHPDLILLQYVDDLLLAATSELDCQQGTRALLKTLGNLGYRASAKKAQICQKQVKYLGYLLREGQRWLTEARKETVMGQPTPKTPRQLREFLGKAGFCRLFIPRFAEMAAPLYPLTKPGTLFNWGPDQQKAYHEIKQALLTAPALGLPDLTKPFELFVDEKQGYAKGVLTQKLGPWRRPVAYLSKKLDPVAAGWPPCLRMVAAIAVLTKDAGKLTMGQPLVILAPHAVEALVKQPPDRWLSNARMTHYQAMLLDTDRVQFGPVVALNPATLLPLPEEGAPHDCLEILAETHGTEPDLTDQPIPDADHTWYTDGSSFLQEGQRKAGAAVTTETEVIWARALPAGTSAQRAELIALTQALKMAEGKRLNVYTDSRYAFATAHIHGEIYKRRGWLTSEGREIKNKSEILALLKALFLPKRLSIIHCLGHQKGDSAEARGNRLADQAAREAAIKTPPDTSTLLAGKRTADGSEFEKRTADGSEFESPKKKAKVE

SEQ ID NO: 7582 - protein, 2090 aa, synthetic construct
MPAAKRVKLDGGDKKYSIGLDIGTNSVGWAVITDEYKVPSKKFKVLGNTDRHSIKKNLIGALLFDSGETAEATRLKRTARRRYTRRKNRICYLQEIFSNEMAKVDDSFFHRLEESFLVEEDKKHERHPIFGNIVDEVAYHEKYPTIYHLRKKLVDSTDKADLRLIYLALAHMIKFRGHFLIEGDLNPDNSDVDKLFIQLVQTYNQLFEENPINASGVDAKAILSARLSKSRRLENLIAQLPGEKKNGLFGNLIALSLGLTPNFKSNFDLAEDAKLQLSKDTYDDDLDNLLAQIGDQYADLFLAAKNLSDAILLSDILRVNTEITKAPLSASMIKRYDEHHQDLTLLKALVRQQLPEKYKEIFFDQSKNGYAGYIDGGASQEEFYKFIKPILEKMDGTEELLVKLNREDLLRKQRTFDNGSIPHQIHLGELHAILRRQEDFYPFLKDNREKIEKILTFRIPYYVGPLARGNSRFAWMTRKSEETITPWNFEEVVDKGASAQSFIERMTNFDKNLPNEKVLPKHSLLYEYFTVYNELTKVKYVTEGMRKPAFLSGEQKKAIVDLLFKTNRKVTVKQLKEDYFKKIECFDSVEISGVEDRFNASLGTYHDLLKIIKDKDFLDNEENEDILEDIVLTLTLFEDREMIEERLKTYAHLFDDKVMKQLKRRRYTGWGRLSRKLINGIRDKQSGKTILDFLKSDGFANRNFMQLIHDDSLTFKEDIQKAQVSGQGDSLHEHIANLAGSPAIKKGILQTVKVVDELVKVMGRHKPENIVIEMARENQTTQKGQKNSRERMKRIEEGIKELGSQILKEHPVENTQLQNEKLYLYYLQNGRDMYVDQELDINRLSDYDVDHIVPQSFLKDDSIDNKVLTRSDKARGKSDNVPSEEVVKKMKNYWRQLLNAKLITQRKFDNLTKAERGGLSELDKAGFIKRQLVETRQITKHVAQILDSRMNTKYDENDKLIREVKVITLKSKLVSDFRKDFQFYKVREINNYHHAHDAYLNAVVGTALIKKYPKLESEFVYGDYKVYDVRKMIAKSEQEIGKATAKYFFYSNIMNFFKTEITLANGEIRKRPLIETNGETGEIVWDKGRDFATVRKVLSMPQVNIVKKTEVQTGGFSKESILPKRNSDKLIARKKDWDPKKYGGFDSPTVAYSVLVVAKVEKGKSKKLKSVKELLGITIMERSSFEKNPIDFLEAKGYKEVKKDLIIKLPKYSLFELENGRKRMLASAGELQKGNELALPSKYVNFLYLASHYEKLKGSPEDNEQKQLFVEQHKHYLDEIIEQISEFSKRVILADANLDKVLSAYNKHRDKPIREQAENIIHLFTLTNLGAPAAFKYFDTTIDRKRYTSTKEVLDATLIHQSITGLYETRIDLSQLGGDGGGSSEAAAKPAPGGTLQLDDEYRLYSPLVKPDQNIQFWLEQFPQAWAETAGMGLAKQVPPQVIQLKASATPVSVRQYPLSKEAQEGIRPHVQRLIQQGILVPVQSPWNTPLLPVRKPGTNDYRPVQDLREVNKRVQDIHPTVPNPYNLLCALPPQRSWYTVLDLKDAFFCLRLHPTSQPLFAFEWRDPGTGRTGQLTWTRLPQGFKNSPTIFDEALHRDLANFRIQHPQVTLLQYVDDLLLAGATKQDCLEGTKALLLELSDLGYRASAKKAQICRREVTYLGYSLRDGQRWLTEARKKTVVQIPAPTTAKQVREFLGTAGFCRLWIPGFATLAAPLYPLTKEKGEFSWAPEHQKAFDAIKKALLSAPALALPDVTKPFTLYVDERKGVARGVLTQTLGPWRRPVAYLSKKLDPVASGWPVCLKAIAAVAILVKDADKLTLGQNITVIAPHALENIVRQPPDRWMTNARMTHYQSLLLTERVTFAPPAALNPATLLPEETDEPVTHDCHQLLIEETGVRKDLTDIPLTGEVLTWFTDGSSYVVEGKRMAGAAVVDGTRTIWASSLPEGTSAQKAELMALTQALRLAEGKSINIYTDSRYAFATAHVHGAIYKQRGLLTSAGREIKNKEEILSLLEALHLPKRLAIIHCPGHQKAKDPISRGNQMADRVAKQAAQGVNLLAGKRTADGSEFEKRTADGSEFESPKKKAKVE

SEQ ID NO: 7583 - protein, 2176 aa, synthetic construct
MPAAKRVKLDGGDKKYSIGLDIGTNSVGWAVITDEYKVPSKKFKVLGNTDRHSIKKNLIGALLFDSGETAEATRLKRTARRRYTRRKNRICYLQEIFSNEMAKVDDSFFHRLEESFLVEEDKKHERHPIFGNIVDEVAYHEKYPTIYHLRKKLVDSTDKADLRLIYLALAHMIKFRGHFLIEGDLNPDNSDVDKLFIQLVQTYNQLFEENPINASGVDAKAILSARLSKSRRLENLIAQLPGEKKNGLFGNLIALSLGLTPNFKSNFDLAEDAKLQLSKDTYDDDLDNLLAQIGDQYADLFLAAKNLSDAILLSDILRVNTEITKAPLSASMIKRYDEHHQDLTLLKALVRQQLPEKYKEIFFDQSKNGYAGYIDGGASQEEFYKFIKPILEKMDGTEELLVKLNREDLLRKQRTFDNGSIPHQIHLGELHAILRRQEDFYPFLKDNREKIEKILTFRIPYYVGPLARGNSRFAWMTRKSEETITPWNFEEVVDKGASAQSFIERMTNFDKNLPNEKVLPKHSLLYEYFTVYNELTKVKYVTEGMRKPAFLSGEQKKAIVDLLFKTNRKVTVKQLKEDYFKKIECFDSVEISGVEDRFNASLGTYHDLLKIIKDKDFLDNEENEDILEDIVLTLTLFEDREMIEERLKTYAHLFDDKVMKQLKRRRYTGWGRLSRKLINGIRDKQSGKTILDFLKSDGFANRNFMQLIHDDSLTFKEDIQKAQVSGQGDSLHEHIANLAGSPAIKKGILQTVKVVDELVKVMGRHKPENIVIEMARENQTTQKGQKNSRERMKRIEEGIKELGSQILKEHPVENTQLQNEKLYLYYLQNGRDMYVDQELDINRLSDYDVDHIVPQSFLKDDSIDNKVLTRSDKARGKSDNVPSEEVVKKMKNYWRQLLNAKLITQRKFDNLTKAERGGLSELDKAGFIKRQLVETRQITKHVAQILDSRMNTKYDENDKLIREVKVITLKSKLVSDFRKDFQFYKVREINNYHHAHDAYLNAVVGTALIKKYPKLESEFVYGDYKVYDVRKMIAKSEQEIGKATAKYFFYSNIMNFFKTEITLANGEIRKRPLIETNGETGEIVWDKGRDFATVRKVLSMPQVNIVKKTEVQTGGFSKESILPKRNSDKLIARKKDWDPKKYGGFDSPTVAYSVLVVAKVEKGKSKKLKSVKELLGITIMERSSFEKNPIDFLEAKGYKEVKKDLIIKLPKYSLFELENGRKRMLASAGELQKGNELALPSKYVNFLYLASHYEKLKGSPEDNEQKQLFVEQHKHYLDEIIEQISEFSKRVILADANLDKVLSAYNKHRDKPIREQAENIIHLFTLTNLGAPAAFKYFDTTIDRKRYTSTKEVLDATLIHQSITGLYETRIDLSQLGGDGGGSSEAAAKPAPGGMDPLQLLQPLEAEIKGTKLKAHWNSGATITCVPQAFLEEEVPIKNIWIKTIHGEKEQPVYYLTFKIQGRKVEAEVISSPYDYILVSPSDIPWLMKKPLQLTTLVPLQEYEERLLKQTMLTGSYKEKLQSLFLKYDALWQHWENQVGHRRIKPHHIATGTVNPRPQKQYPINPKAKASIQTVINDLLKQGVLIQQNSIMNTPVYPVPKPDGKWRMVLDYREVNKTIPLIAAQNQHSAGILSSIFRGKYKTTLDLSNGFWAHSITPESYWLTAFTWLGQQYCWTRLPQGFLNSPALFNADVVDLLKEVPNVQVYVDDIYISHDDPREHLEQLEKVFSLLLNAGYVVSLKKSEIAQHEVEFLGFNITKEGRGLTETFKQKLLNITPPRDLKQLQSILGKLNFARNFIPNFSELVKPLYNIIATAPGKYITWTTDNSQQLQNIISMLNSAENLEERNPEVRLIMKVNTSPSAGYIRFYNEFAKRPIMYLNYVYTKAEVKFTNTEKLLTTIHKGLIKALDLGMGQEILVYSPIVSMTKIQKTPLPERKALPIRWITWMSYLEDPRIQFHYDKTLPELQQVPTVTDDIIAKIKHPSEFSMVFYTDGSAIKHPNVNKSHNAGMGIAQVQFKPEFTVINTWSIPLGDHTAQLAEVAAVEFACKKALKIDGPVLIVTDSFYVAESVNKELPYWQSNGFFNNKKKPLKHVSKWKSIADCIQLKPDIIIIHEKGHQPTASTFHTEGNNLADKLATQGSYVVNAGKRTADGSEFEKRTADGSEFESPKKKAKVE

SEQ ID NO: 7584 - protein, 2094 aa, synthetic construct
MPAAKRVKLDGGDKKYSIGLDIGTNSVGWAVITDEYKVPSKKFKVLGNTDRHSIKKNLIGALLFDSGETAEATRLKRTARRRYTRRKNRICYLQEIFSNEMAKVDDSFFHRLEESFLVEEDKKHERHPIFGNIVDEVAYHEKYPTIYHLRKKLVDSTDKADLRLIYLALAHMIKFRGHFLIEGDLNPDNSDVDKLFIQLVQTYNQLFEENPINASGVDAKAILSARLSKSRRLENLIAQLPGEKKNGLFGNLIALSLGLTPNFKSNFDLAEDAKLQLSKDTYDDDLDNLLAQIGDQYADLFLAAKNLSDAILLSDILRVNTEITKAPLSASMIKRYDEHHQDLTLLKALVRQQLPEKYKEIFFDQSKNGYAGYIDGGASQEEFYKFIKPILEKMDGTEELLVKLNREDLLRKQRTFDNGSIPHQIHLGELHAILRRQEDFYPFLKDNREKIEKILTFRIPYYVGPLARGNSRFAWMTRKSEETITPWNFEEVVDKGASAQSFIERMTNFDKNLPNEKVLPKHSLLYEYFTVYNELTKVKYVTEGMRKPAFLSGEQKKAIVDLLFKTNRKVTVKQLKEDYFKKIECFDSVEISGVEDRFNASLGTYHDLLKIIKDKDFLDNEENEDILEDIVLTLTLFEDREMIEERLKTYAHLFDDKVMKQLKRRRYTGWGRLSRKLINGIRDKQSGKTILDFLKSDGFANRNFMQLIHDDSLTFKEDIQKAQVSGQGDSLHEHIANLAGSPAIKKGILQTVKVVDELVKVMGRHKPENIVIEMARENQTTQKGQKNSRERMKRIEEGIKELGSQILKEHPVENTQLQNEKLYLYYLQNGRDMYVDQELDINRLSDYDVDHIVPQSFLKDDSIDNKVLTRSDKARGKSDNVPSEEVVKKMKNYWRQLLNAKLITQRKFDNLTKAERGGLSELDKAGFIKRQLVETRQITKHVAQILDSRMNTKYDENDKLIREVKVITLKSKLVSDFRKDFQFYKVREINNYHHAHDAYLNAVVGTALIKKYPKLESEFVYGDYKVYDVRKMIAKSEQEIGKATAKYFFYSNIMNFFKTEITLANGEIRKRPLIETNGETGEIVWDKGRDFATVRKVLSMPQVNIVKKTEVQTGGFSKESILPKRNSDKLIARKKDWDPKKYGGFDSPTVAYSVLVVAKVEKGKSKKLKSVKELLGITIMERSSFEKNPIDFLEAKGYKEVKKDLIIKLPKYSLFELENGRKRMLASAGELQKGNELALPSKYVNFLYLASHYEKLKGSPEDNEQKQLFVEQHKHYLDEIIEQISEFSKRVILADANLDKVLSAYNKHRDKPIREQAENIIHLFTLTNLGAPAAFKYFDTTIDRKRYTSTKEVLDATLIHQSITGLYETRIDLSQLGGDGGGSSEAAAKPAPGGVLNLEEEYRLHEKPVPSSIDPSWLQLFPTVWAERAGMGLANQVPPVVVELRSGASPVAVRQYPMSKEAREGIRPHIQRFLDLGVLVPCQSPWNTPLLPVKKPGTNDYRPVQDLREINKRVQDIHPTVPNPYNLLSSLPPSHTWYSVLDLKDAFFCLKLHPNSQPLFAFEWRDPEKGNTGQLTWTRLPQGFKNSPTLFDEALHRDLAPFRALNPQVVLLQYVDDLLVAAPTYRDCKEGTQKLLQELSKLGYRVSAKKAQLCQKEVTYLGYLLKEGKRWLTPARKATVMKIPPPTTPRQVREFLGTAGFCRLWIPGFASLAAPLYPLTKESIPFIWTEEHQKAFDRIKEALLSAPALALPDLTKPFTLYVDERAGVARGVLTQTLGPWRRPVAYLSKKLDPVASGWPTCLKAVAAVALLLKDADKLTLGQNVTVIASHSLESIVRQPPDRWMTNARMTHYQSLLLNERVSFAPPAVLNPATLLPVESEATPVHRCSEILAEETGTRRDLKDQPLPGVPAWYTDGSSFIAEGKRRAGAAIVDGKRTVWASSLPEGTSAQKAELVALTQALRLAEGKDINIYTDSRYAFATAHIHGAIYKQRGLLTSAGKDIKNKEEILALLEAIHLPKRVAIIHCPGHQKGNDPVATGNRRADEAAKQAALSTRVLAETTKPAGKRTADGSEFEKRTADGSEFESPKKKAKVE

SEQ ID NO: 7585 - protein, 2094 aa, synthetic construct
MPAAKRVKLDGGDKKYSIGLDIGTNSVGWAVITDEYKVPSKKFKVLGNTDRHSIKKNLIGALLFDSGETAEATRLKRTARRRYTRRKNRICYLQEIFSNEMAKVDDSFFHRLEESFLVEEDKKHERHPIFGNIVDEVAYHEKYPTIYHLRKKLVDSTDKADLRLIYLALAHMIKFRGHFLIEGDLNPDNSDVDKLFIQLVQTYNQLFEENPINASGVDAKAILSARLSKSRRLENLIAQLPGEKKNGLFGNLIALSLGLTPNFKSNFDLAEDAKLQLSKDTYDDDLDNLLAQIGDQYADLFLAAKNLSDAILLSDILRVNTEITKAPLSASMIKRYDEHHQDLTLLKALVRQQLPEKYKEIFFDQSKNGYAGYIDGGASQEEFYKFIKPILEKMDGTEELLVKLNREDLLRKQRTFDNGSIPHQIHLGELHAILRRQEDFYPFLKDNREKIEKILTFRIPYYVGPLARGNSRFAWMTRKSEETITPWNFEEVVDKGASAQSFIERMTNFDKNLPNEKVLPKHSLLYEYFTVYNELTKVKYVTEGMRKPAFLSGEQKKAIVDLLFKTNRKVTVKQLKEDYFKKIECFDSVEISGVEDRFNASLGTYHDLLKIIKDKDFLDNEENEDILEDIVLTLTLFEDREMIEERLKTYAHLFDDKVMKQLKRRRYTGWGRLSRKLINGIRDKQSGKTILDFLKSDGFANRNFMQLIHDDSLTFKEDIQKAQVSGQGDSLHEHIANLAGSPAIKKGILQTVKVVDELVKVMGRHKPENIVIEMARENQTTQKGQKNSRERMKRIEEGIKELGSQILKEHPVENTQLQNEKLYLYYLQNGRDMYVDQELDINRLSDYDVDHIVPQSFLKDDSIDNKVLTRSDKARGKSDNVPSEEVVKKMKNYWRQLLNAKLITQRKFDNLTKAERGGLSELDKAGFIKRQLVETRQITKHVAQILDSRMNTKYDENDKLIREVKVITLKSKLVSDFRKDFQFYKVREINNYHHAHDAYLNAVVGTALIKKYPKLESEFVYGDYKVYDVRKMIAKSEQEIGKATAKYFFYSNIMNFFKTEITLANGEIRKRPLIETNGETGEIVWDKGRDFATVRKVLSMPQVNIVKKTEVQTGGFSKESILPKRNSDKLIARKKDWDPKKYGGFDSPTVAYSVLVVAKVEKGKSKKLKSVKELLGITIMERSSFEKNPIDFLEAKGYKEVKKDLIIKLPKYSLFELENGRKRMLASAGELQKGNELALPSKYVNFLYLASHYEKLKGSPEDNEQKQLFVEQHKHYLDEIIEQISEFSKRVILADANLDKVLSAYNKHRDKPIREQAENIIHLFTLTNLGAPAAFKYFDTTIDRKRYTSTKEVLDATLIHQSITGLYETRIDLSQLGGDGGGSSEAAAKPAPGGVLNLEEEYRLHEKPVPSSIDPSWLQLFPTVWAERAGMGLANQVPPVVVELRSGASPVAVRQYPMSKEAREGIRPHIQRFLDLGVLVPCQSPWNTPLLPVKKPGTNDYRPVQDLREINKRVQDIHPTVPNPYNLLSSLPPSHTWYSVLDLKDAFFCLKLHPNSQPLFAFEWRDPEKGNTGQLTWTRLPQGFKNSPTLFNEALHRDLAPFRALNPQVVLLQYVDDLLVAAPTYRDCKEGTQKLLQELSKLGYRVSAKKAQLCQKEVTYLGYLLKEGKRWLTPARKATVMKIPPPTTPRQVREFLGTAGFCRLWIPGFASLAAPLYPLTKPSIPFIWTEEHQKAFDRIKEALLSAPALALPDLTKPFTLYVDERAGVARGVLTQTLGPWRRPVAYLSKKLDPVASGWPTCLKAVAAVALLLKDADKLTLGQNVTVIASHSLESIVRQPPDRWMTNARMTHYQSLLLNERVSFAPPAVLNPATLLPVESEATPVHRCSEILAEETGTRRDLKDQPLPGVPAWYTDGSSFIAEGKRRAGAAIVDGKRTVWASSLPEGTSAQKAELVALTQALRLAEGKDINIYTDSRYAFATAHIHGAIYKQRGWLTSAGKDIKNKEEILALLEAIHLPKRVAIIHCPGHQKGNDPVATGNRRADEAAKQAALSTRVLAETTKPAGKRTADGSEFEKRTADGSEFESPKKKAKVE

SEQ ID NO: 7586 - protein, 2094 aa, synthetic construct
MPAAKRVKLDGGDKKYSIGLDIGTNSVGWAVITDEYKVPSKKFKVLGNTDRHSIKKNLIGALLFDSGETAEATRLKRTARRRYTRRKNRICYLQEIFSNEMAKVDDSFFHRLEESFLVEEDKKHERHPIFGNIVDEVAYHEKYPTIYHLRKKLVDSTDKADLRLIYLALAHMIKFRGHFLIEGDLNPDNSDVDKLFIQLVQTYNQLFEENPINASGVDAKAILSARLSKSRRLENLIAQLPGEKKNGLFGNLIALSLGLTPNFKSNFDLAEDAKLQLSKDTYDDDLDNLLAQIGDQYADLFLAAKNLSDAILLSDILRVNTEITKAPLSASMIKRYDEHHQDLTLLKALVRQQLPEKYKEIFFDQSKNGYAGYIDGGASQEEFYKFIKPILEKMDGTEELLVKLNREDLLRKQRTFDNGSIPHQIHLGELHAILRRQEDFYPFLKDNREKIEKILTFRIPYYVGPLARGNSRFAWMTRKSEETITPWNFEEVVDKGASAQSFIERMTNFDKNLPNEKVLPKHSLLYEYFTVYNELTKVKYVTEGMRKPAFLSGEQKKAIVDLLFKTNRKVTVKQLKEDYFKKIECFDSVEISGVEDRFNASLGTYHDLLKIIKDKDFLDNEENEDILEDIVLTLTLFEDREMIEERLKTYAHLFDDKVMKQLKRRRYTGWGRLSRKLINGIRDKQSGKTILDFLKSDGFANRNFMQLIHDDSLTFKEDIQKAQVSGQGDSLHEHIANLAGSPAIKKGILQTVKVVDELVKVMGRHKPENIVIEMARENQTTQKGQKNSRERMKRIEEGIKELGSQILKEHPVENTQLQNEKLYLYYLQNGRDMYVDQELDINRLSDYDVDHIVPQSFLKDDSIDNKVLTRSDKARGKSDNVPSEEVVKKMKNYWRQLLNAKLITQRKFDNLTKAERGGLSELDKAGFIKRQLVETRQITKHVAQILDSRMNTKYDENDKLIREVKVITLKSKLVSDFRKDFQFYKVREINNYHHAHDAYLNAVVGTALIKKYPKLESEFVYGDYKVYDVRKMIAKSEQEIGKATAKYFFYSNIMNFFKTEITLANGEIRKRPLIETNGETGEIVWDKGRDFATVRKVLSMPQVNIVKKTEVQTGGFSKESILPKRNSDKLIARKKDWDPKKYGGFDSPTVAYSVLVVAKVEKGKSKKLKSVKELLGITIMERSSFEKNPIDFLEAKGYKEVKKDLIIKLPKYSLFELENGRKRMLASAGELQKGNELALPSKYVNFLYLASHYEKLKGSPEDNEQKQLFVEQHKHYLDEIIEQISEFSKRVILADANLDKVLSAYNKHRDKPIREQAENIIHLFTLTNLGAPAAFKYFDTTIDRKRYTSTKEVLDATLIHQSITGLYETRIDLSQLGGDGGGSSEAAAKPAPGGVLNLEEEYRLHEKPVPSSIDPSWLQLFPTVWAERAGMGLANQVPPVVVELRSGASPVAVRQYPMSKEAREGIRPHIQRFLDLGVLVPCQSPWNTPLLPVKKPGTNDYRPVQDLREINKRVQDIHPTVPNPYNLLSSLPPSHTWYSVLDLKDAFFCLKLHPNSQPLFAFEWRDPEKGNTGQLTWTRLPQGFKNSPTLFNEALHRDLAPFRALNPQVVLLQYVDDLLVAAPTYRDCKEGTQKLLQELSKLGYRVSAKKAQLCQKEVTYLGYLLKEGKRWLTPARKATVMKIPPPTTPRQVREFLGKAGFCRLFIPGFASLAAPLYPLTKPSIPFIWTEEHQKAFDRIKEALLSAPALALPDLTKPFTLYVDERAGVARGVLTQTLGPWRRPVAYLSKKLDPVASGWPTCLKAVAAVALLLKDADKLTLGQNVTVIASHSLESIVRQPPDRWMTNARMTHYQSLLLNERVSFAPPAVLNPATLLPVESEATPVHRCSEILAEETGTRRDLKDQPLPGVPAWYTDGSSFIAEGKRRAGAAIVDGKRTVWASSLPEGTSAQKAELVALTQALRLAEGKDINIYTDSRYAFATAHIHGAIYKQRGWLTSAGKDIKNKEEILALLEAIHLPKRVAIIHCPGHQKGNDPVATGNRRADEAAKQAALSTRVLAETTKPAGKRTADGSEFEKRTADGSEFESPKKKAKVE

SEQ ID NO: 7587 - protein, 2096 aa, synthetic construct; identical to SEQ ID NO: 4538

SEQ ID NO: 7588 - protein, 2098 aa, synthetic construct; identical to SEQ ID NO: 4539

SEQ ID NO: 7589 - protein, 2173 aa, synthetic construct
MPAAKRVKLDGGDKKYSIGLDIGTNSVGWAVITDEYKVPSKKFKVLGNTDRHSIKKNLIGALLFDSGETAEATRLKRTARRRYTRRKNRICYLQEIFSNEMAKVDDSFFHRLEESFLVEEDKKHERHPIFGNIVDEVAYHEKYPTIYHLRKKLVDSTDKADLRLIYLALAHMIKFRGHFLIEGDLNPDNSDVDKLFIQLVQTYNQLFEENPINASGVDAKAILSARLSKSRRLENLIAQLPGEKKNGLFGNLIALSLGLTPNFKSNFDLAEDAKLQLSKDTYDDDLDNLLAQIGDQYADLFLAAKNLSDAILLSDILRVNTEITKAPLSASMIKRYDEHHQDLTLLKALVRQQLPEKYKEIFFDQSKNGYAGYIDGGASQEEFYKFIKPILEKMDGTEELLVKLNREDLLRKQRTFDNGSIPHQIHLGELHAILRRQEDFYPFLKDNREKIEKILTFRIPYYVGPLARGNSRFAWMTRKSEETITPWNFEEVVDKGASAQSFIERMTNFDKNLPNEKVLPKHSLLYEYFTVYNELTKVKYVTEGMRKPAFLSGEQKKAIVDLLFKTNRKVTVKQLKEDYFKKIECFDSVEISGVEDRFNASLGTYHDLLKIIKDKDFLDNEENEDILEDIVLTLTLFEDREMIEERLKTYAHLFDDKVMKQLKRRRYTGWGRLSRKLINGIRDKQSGKTILDFLKSDGFANRNFMQLIHDDSLTFKEDIQKAQVSGQGDSLHEHIANLAGSPAIKKGILQTVKVVDELVKVMGRHKPENIVIEMARENQTTQKGQKNSRERMKRIEEGIKELGSQILKEHPVENTQLQNEKLYLYYLQNGRDMYVDQELDINRLSDYDVDHIVPQSFLKDDSIDNKVLTRSDKARGKSDNVPSEEVVKKMKNYWRQLLNAKLITQRKFDNLTKAERGGLSELDKAGFIKRQLVETRQITKHVAQILDSRMNTKYDENDKLIREVKVITLKSKLVSDFRKDFQFYKVREINNYHHAHDAYLNAVVGTALIKKYPKLESEFVYGDYKVYDVRKMIAKSEQEIGKATAKYFFYSNIMNFFKTEITLANGEIRKRPLIETNGETGEIVWDKGRDFATVRKVLSMPQVNIVKKTEVQTGGFSKESILPKRNSDKLIARKKDWDPKKYGGFDSPTVAYSVLVVAKVEKGKSKKLKSVKELLGITIMERSSFEKNPIDFLEAKGYKEVKKDLIIKLPKYSLFELENGRKRMLASAGELQKGNELALPSKYVNFLYLASHYEKLKGSPEDNEQKQLFVEQHKHYLDEIIEQISEFSKRVILADANLDKVLSAYNKHRDKPIREQAENIIHLFTLTNLGAPAAFKYFDTTIDRKRYTSTKEVLDATLIHQSITGLYETRIDLSQLGGDGGGSSPAPEAAAKGGMDLLKPLTVERKGVKIKGYWNSQADITCVPKDLLQGEEPVRQQNVTTIHGTQEGDVYYVNLKIDGRRINTEVIGTTLDYAIITPGDVPWILKKPLELTIKLDLEEQQGTLLNNSILSKKGKEELKQLFEKYSALWQSWENQVGHRRIRPHKIATGTVKPTPQKQYHINPKAKPDIQIVINDLLKQGVLIQKESTMNTPVYPVPKPNGRWRMVLDYRAVNKVTPLIAVQNQHSYGILGSLFKGRYKTTIDLSNGFWAHPIVPEDYWITAFTWQGKQYCWTVLPQGFLNSPGLFTGDVVDLLQGIPNVEVYVDDVYISHDSEKEHLEYLDILFNRLKEAGYIISLKKSNIANSIVDFLGFQITNEGRGLTDTFKEKLENITAPTTLKQLQSILGLLNFARNFIPDFTELIAPLYALIPKSTKNYVPWQIEHSTTLETLITKLNGAEYLQGRKGDKTLIMKVNASYTTGYIRYYNEGEKKPISYVSIVFSKTELKFTELEKLLTTVHKGLLKALDLSMGQNIHVYSPIVSMQNIQKTPQTAKKALASRWLSWLSYLEDPRIRFFYDPQMPALKDLPAVDTGKDNKKHPSNFQHIFYTDGSAITSPTKEGHLNAGMGIVYFINKDGNLQKQQEWSISLGNHTAQFAEIAAFEFALKKCLPLGGNILVVTDSNYVAKAYNEELDVWASNGFVNNRKKPLKHISKWKSVADLKRLRPDVVVTHEPGHQKLDSSPHAYGNNLADQLATQASFKVHAGKRTADGSEFEKRTADGSEFESPKKKAKVE

SEQ ID NO: 7590 - protein, 2127 aa, synthetic construct
MPAAKRVKLDGGDKKYSIGLDIGTNSVGWAVITDEYKVPSKKFKVLGNTDRHSIKKNLIGALLFDSGETAEATRLKRTARRRYTRRKNRICYLQEIFSNEMAKVDDSFFHRLEESFLVEEDKKHERHPIFGNIVDEVAYHEKYPTIYHLRKKLVDSTDKADLRLIYLALAHMIKFRGHFLIEGDLNPDNSDVDKLFIQLVQTYNQLFEENPINASGVDAKAILSARLSKSRRLENLIAQLPGEKKNGLFGNLIALSLGLTPNFKSNFDLAEDAKLQLSKDTYDDDLDNLLAQIGDQYADLFLAAKNLSDAILLSDILRVNTEITKAPLSASMIKRYDEHHQDLTLLKALVRQQLPEKYKEIFFDQSKNGYAGYIDGGASQEEFYKFIKPILEKMDGTEELLVKLNREDLLRKQRTFDNGSIPHQIHLGELHAILRRQEDFYPFLKDNREKIEKILTFRIPYYVGPLARGNSRFAWMTRKSEETITPWNFEEVVDKGASAQSFIERMTNFDKNLPNEKVLPKHSLLYEYFTVYNELTKVKYVTEGMRKPAFLSGEQKKAIVDLLFKTNRKVTVKQLKEDYFKKIECFDSVEISGVEDRFNASLGTYHDLLKIIKDKDFLDNEENEDILEDIVLTLTLFEDREMIEERLKTYAHLFDDKVMKQLKRRRYTGWGRLSRKLINGIRDKQSGKTILDFLKSDGFANRNFMQLIHDDSLTFKEDIQKAQVSGQGDSLHEHIANLAGSPAIKKGILQTVKVVDELVKVMGRHKPENIVIEMARENQTTQKGQKNSRERMKRIEEGIKELGSQILKEHPVENTQLQNEKLYLYYLQNGRDMYVDQELDINRLSDYDVDHIVPQSFLKDDSIDNKVLTRSDKARGKSDNVPSEEVVKKMKNYWRQLLNAKLITQRKFDNLTKAERGGLSELDKAGFIKRQLVETRQITKHVAQILDSRMNTKYDENDKLIREVKVITLKSKLVSDFRKDFQFYKVREINNYHHAHDAYLNAVVGTALIKKYPKLESEFVYGDYKVYDVRKMIAKSEQEIGKATAKYFFYSNIMNFFKTEITLANGEIRKRPLIETNGETGEIVWDKGRDFATVRKVLSMPQVNIVKKTEVQTGGFSKESILPKRNSDKLIARKKDWDPKKYGGFDSPTVAYSVLVVAKVEKGKSKKLKSVKELLGITIMERSSFEKNPIDFLEAKGYKEVKKDLIIKLPKYSLFELENGRKRMLASAGELQKGNELALPSKYVNFLYLASHYEKLKGSPEDNEQKQLFVEQHKHYLDEIIEQISEFSKRVILADANLDKVLSAYNKHRDKPIREQAENIIHLFTLTNLGAPAAFKYFDTTIDRKRYTSTKEVLDATLIHQSITGLYETRIDLSQLGGDGGGSSPAPEAAAKGGLLGRDLLTKLKAQIQFSTEGPQVTWEDRPAMCLVLNLEEEYRLHEKPVPPSIDPSWLQLFPMVWAEKAGMGLANQVPPVVVELKSDASPVAVRQYPMSKEAREGIRPHIQRFLDLGILVPCQSPWNTPLLPVKKPGTNDYRPVQDLREVNKRVQDIHPTVPNPYNLLSSLPPSHTWYSVLDLKDAFFCLKLHPNSQPLFAFEWRDPEKGNTGQLTWTRLPQGFKNSPTLFNEALHRDLASFRALNPQVVMLQYVDDLLVAAPTYRDCKEGTRRLLQELSKLGYRVSAKKAQLCREEVTYLGYLLKGGKRWLTPARKATVMKIPTPTTPRQVREFLGTAGFCRLWIPGFASLAAPLYPLTRPKVPFTWTEAHQEAFGRIKEALLSAPALALPDLTKPFALYVDEKEGVARGVLTQTLGPWRRPVAYLSKKLDPVASGWPTCLKAIAAVALLLKDADKLTLGQNVLVIAPHNLESIVRQPPDRWMTNARMTHYQSLLLNERVSFAPPAILNPATLLPVESDDTPIHICSEILAEETGTRPDLRDQPLPGVPAWYTDGSSFIMDGRRQAGAAIVDNKRTVWASNLPEGTSAQKAELIALTQALRLAEGKSINIYTDSRYAFATAHVHGAIYKQRGWLTSAGKDIKNKEEILALLEAIHLPKRVAIIHCPGHQRGTDPVATGNRKADEAAKQAAQSTRILTETTKNAGKRTADGSEFEKRTADGSEFESPKKKAKVE

SEQ ID NO: 7591 - protein, 2218 aa, synthetic construct
MPAAKRVKLDGGDKKYSIGLDIGTNSVGWAVITDEYKVPSKKFKVLGNTDRHSIKKNLIGALLFDSGETAEATRLKRTARRRYTRRKNRICYLQEIFSNEMAKVDDSFFHRLEESFLVEEDKKHERHPIFGNIVDEVAYHEKYPTIYHLRKKLVDSTDKADLRLIYLALAHMIKFRGHFLIEGDLNPDNSDVDKLFIQLVQTYNQLFEENPINASGVDAKAILSARLSKSRRLENLIAQLPGEKKNGLFGNLIALSLGLTPNFKSNFDLAEDAKLQLSKDTYDDDLDNLLAQIGDQYADLFLAAKNLSDAILLSDILRVNTEITKAPLSASMIKRYDEHHQDLTLLKALVRQQLPEKYKEIFFDQSKNGYAGYIDGGASQEEFYKFIKPILEKMDGTEELLVKLNREDLLRKQRTFDNGSIPHQIHLGELHAILRRQEDFYPFLKDNREKIEKILTFRIPYYVGPLARGNSRFAWMTRKSEETITPWNFEEVVDKGASAQSFIERMTNFDKNLPNEKVLPKHSLLYEYFTVYNELTKVKYVTEGMRKPAFLSGEQKKAIVDLLFKTNRKVTVKQLKEDYFKKIECFDSVEISGVEDRFNASLGTYHDLLKIIKDKDFLDNEENEDILEDIVLTLTLFEDREMIEERLKTYAHLFDDKVMKQLKRRRYTGWGRLSRKLINGIRDKQSGKTILDFLKSDGFANRNFMQLIHDDSLTFKEDIQKAQVSGQGDSLHEHIANLAGSPAIKKGILQTVKVVDELVKVMGRHKPENIVIEMARENQTTQKGQKNSRERMKRIEEGIKELGSQILKEHPVENTQLQNEKLYLYYLQNGRDMYVDQELDINRLSDYDVDHIVPQSFLKDDSIDNKVLTRSDKARGKSDNVPSEEVVKKMKNYWRQLLNAKLITQRKFDNLTKAERGGLSELDKAGFIKRQLVETRQITKHVAQILDSRMNTKYDENDKLIREVKVITLKSKLVSDFRKDFQFYKVREINNYHHAHDAYLNAVVGTALIKKYPKLESEFVYGDYKVYDVRKMIAKSEQEIGKATAKYFFYSNIMNFFKTEITLANGEIRKRPLIETNGETGEIVWDKGRDFATVRKVLSMPQVNIVKKTEVQTGGFSKESILPKRNSDKLIARKKDWDPKKYGGFDSPTVAYSVLVVAKVEKGKSKKLKSVKELLGITIMERSSFEKNPIDFLEAKGYKEVKKDLIIKLPKYSLFELENGRKRMLASAGELQKGNELALPSKYVNFLYLASHYEKLKGSPEDNEQKQLFVEQHKHYLDEIIEQISEFSKRVILADANLDKVLSAYNKHRDKPIREQAENIIHLFTLTNLGAPAAFKYFDTTIDRKRYTSTKEVLDATLIHQSITGLYETRIDLSQLGGDGGGSSPAPEAAAKGGTLGDQGSRGSDPLPEPRVTLTVEGIPTEFLVNTGAEHSVLTKPMGKMGSKRTVVAGATGSKVYPWTTKRLLKIGQKQVTHSFLVIPECPAPLLGRDLLTKLKAQIQFSTEGPQVTWEDRPAMCLVLNLEEEYRLHEKPVPPSIDPSWLQLFPMVWAEKAGMGLANQVPPVVVELKSDASPVAVRQYPMSKEAREGIRPHIQRFLDLGILVPCQSPWNTPLLPVKKPGTNDYRPVQDLREVNKRVQDIHPTVPNPYNLLSSLPPSHTWYSVLDLKDAFFCLKLHPNSQPLFAFEWRDPEKGNTGQLTWTRLPQGFKNSPTLFNEALHRDLASFRALNPQVVMLQYVDDLLVAAPTYRDCKEGTRRLLQELSKLGYRVSAKKAQLCREEVTYLGYLLKGGKRWLTPARKATVMKIPTPTTPRQVREFLGTAGFCRLWIPGFASLAAPLYPLTRPKVPFTWTEAHQEAFGRIKEALLSAPALALPDLTKPFALYVDEKEGVARGVLTQTLGPWRRPVAYLSKKLDPVASGWPTCLKAIAAVALLLKDADKLTLGQNVLVIAPHNLESIVRQPPDRWMTNARMTHYQSLLLNERVSFAPPAILNPATLLPVESDDTPIHICSEILAEETGTRPDLRDQPLPGVPAWYTDGSSFIMDGRRQAGAAIVDNKRTVWASNLPEGTSAQKAELIALTQALRLAEGKSINIYTDSRYAFATAHVHGAIYKQRGWLTSAGKDIKNKEEILALLEAIHLPKRVAIIHCPGHQRGTDPVATGNRKADEAAKQAAQSTRILTETTKNAGKRTADGSEFEKRTADGSEFESPKKKAKVE

SEQ ID NO: 7592 - protein, 2096 aa, synthetic construct
MPAAKRVKLDGGDKKYSIGLDIGTNSVGWAVITDEYKVPSKKFKVLGNTDRHSIKKNLIGALLFDSGETAEATRLKRTARRRYTRRKNRICYLQEIFSNEMAKVDDSFFHRLEESFLVEEDKKHERHPIFGNIVDEVAYHEKYPTIYHLRKKLVDSTDKADLRLIYLALAHMIKFRGHFLIEGDLNPDNSDVDKLFIQLVQTYNQLFEENPINASGVDAKAILSARLSKSRRLENLIAQLPGEKKNGLFGNLIALSLGLTPNFKSNFDLAEDAKLQLSKDTYDDDLDNLLAQIGDQYADLFLAAKNLSDAILLSDILRVNTEITKAPLSASMIKRYDEHHQDLTLLKALVRQQLPEKYKEIFFDQSKNGYAGYIDGGASQEEFYKFIKPILEKMDGTEELLVKLNREDLLRKQRTFDNGSIPHQIHLGELHAILRRQEDFYPFLKDNREKIEKILTFRIPYYVGPLARGNSRFAWMTRKSEETITPWNFEEVVDKGASAQSFIERMTNFDKNLPNEKVLPKHSLLYEYFTVYNELTKVKYVTEGMRKPAFLSGEQKKAIVDLLFKTNRKVTVKQLKEDYFKKIECFDSVEISGVEDRFNASLGTYHDLLKIIKDKDFLDNEENEDILEDIVLTLTLFEDREMIEERLKTYAHLFDDKVMKQLKRRRYTGWGRLSRKLINGIRDKQSGKTILDFLKSDGFANRNFMQLIHDDSLTFKEDIQKAQVSGQGDSLHEHIANLAGSPAIKKGILQTVKVVDELVKVMGRHKPENIVIEMARENQTTQKGQKNSRERMKRIEEGIKELGSQILKEHPVENTQLQNEKLYLYYLQNGRDMYVDQELDINRLSDYDVDHIVPQSFLKDDSIDNKVLTRSDKARGKSDNVPSEEVVKKMKNYWRQLLNAKLITQRKFDNLTKAERGGLSELDKAGFIKRQLVETRQITKHVAQILDSRMNTKYDENDKLIREVKVITLKSKLVSDFRKDFQFYKVREINNYHHAHDAYLNAVVGTALIKKYPKLESEFVYGDYKVYDVRKMIAKSEQEIGKATAKYFFYSNIMNFFKTEITLANGEIRKRPLIETNGETGEIVWDKGRDFATVRKVLSMPQVNIVKKTEVQTGGFSKESILPKRNSDKLIARKKDWDPKKYGGFDSPTVAYSVLVVAKVEKGKSKKLKSVKELLGITIMERSSFEKNPIDFLEAKGYKEVKKDLIIKLPKYSLFELENGRKRMLASAGELQKGNELALPSKYVNFLYLASHYEKLKGSPEDNEQKQLFVEQHKHYLDEIIEQISEFSKRVILADANLDKVLSAYNKHRDKPIREQAENIIHLFTLTNLGAPAAFKYFDTTIDRKRYTSTKEVLDATLIHQSITGLYETRIDLSQLGGDGGGSSPAPEAAAKGGTLGIEDEYRLHETSTEPDVSLGSTWLSDFPQAWAETGGMGLAVRQAPLIIPLKATSTPVSIQQYPMSHEARLGIKPHIQRLLDQGILVPCQSPWNTPLLPVKKPGTNDYRPVQDLREVNKRVEDIHPTVPNPYNLLSGLPPSHQWYTVLDLKDAFFCLRLHPTSQPLFAFEWRDPGMGISGQLTWTRLPQGFKNSPTLFNEALHRDLADFRIQHPDLILLQYVDDILLAATSELDCQQGTRALLQTLGDLGYRASAKKAQICQKQVKYLGYLLREGQRWLTEARKETVMGQPVPKTPRQLREFLGTAGFCRLWIPGFAEMAAPLYPLTKPGTLFSWGPDQQKAYQEIKQALLTAPALGLPDLTKPFELFVDEKQGYAKGVLTQKLGPWRRPVAYLSKKLDPVAAGWPPCLRMVAAIAVLTKDAGKLTMGQPLVILAPHAVEALVKQPPDRWLSNARMTHYQAMLLDTDRVQFGPVVALNPATLLPLPEEGAPHDCLEILAETHGTRPDLTDQPIPDADHTWYTDGSSFLQEGQRKAGAAVTTETEVIWAGALPAGTSAQRAELIALTQALKMAEGKRLNVYTDSRYAFATAHIHGEIYRRRGWLTSEGREIKNKSEILALLKALFLPKRLSIIHCLGHQKGDSAEARGNRLADQAAREAAIKTPPDTSTLLAGKRTADGSEFEKRTADGSEFESPKKKAKVE

SEQ ID NO: 7593 - protein, 2096 aa, synthetic construct
MPAAKRVKLDGGDKKYSIGLDIGTNSVGWAVITDEYKVPSKKFKVLGNTDRHSIKKNLIGALLFDSGETAEATRLKRTARRRYTRRKNRICYLQEIFSNEMAKVDDSFFHRLEESFLVEEDKKHERHPIFGNIVDEVAYHEKYPTIYHLRKKLVDSTDKADLRLIYLALAHMIKFRGHFLIEGDLNPDNSDVDKLFIQLVQTYNQLFEENPINASGVDAKAILSARLSKSRRLENLIAQLPGEKKNGLFGNLIALSLGLTPNFKSNFDLAEDAKLQLSKDTYDDDLDNLLAQIGDQYADLFLAAKNLSDAILLSDILRVNTEITKAPLSASMIKRYDEHHQDLTLLKALVRQQLPEKYKEIFFDQSKNGYAGYIDGGASQEEFYKFIKPILEKMDGTEELLVKLNREDLLRKQRTFDNGSIPHQIHLGELHAILRRQEDFYPFLKDNREKIEKILTFRIPYYVGPLARGNSRFAWMTRKSEETITPWNFEEVVDKGASAQSFIERMTNFDKNLPNEKVLPKHSLLYEYFTVYNELTKVKYVTEGMRKPAFLSGEQKKAIVDLLFKTNRKVTVKQLKEDYFKKIECFDSVEISGVEDRFNASLGTYHDLLKIIKDKDFLDNEENEDILEDIVLTLTLFEDREMIEERLKTYAHLFDDKVMKQLKRRRYTGWGRLSRKLINGIRDKQSGKTILDFLKSDGFANRNFMQLIHDDSLTFKEDIQKAQVSGQGDSLHEHIANLAGSPAIKKGILQTVKVVDELVKVMGRHKPENIVIEMARENQTTQKGQKNSRERMKRIEEGIKELGSQILKEHPVENTQLQNEKLYLYYLQNGRDMYVDQELDINRLSDYDVDHIVPQSFLKDDSIDNKVLTRSDKARGKSDNVPSEEVVKKMKNYWRQLLNAKLITQRKFDNLTKAERGGLSELDKAGFIKRQLVETRQITKHVAQILDSRMNTKYDENDKLIREVKVITLKSKLVSDFRKDFQFYKVREINNYHHAHDAYLNAVVGTALIKKYPKLESEFVYGDYKVYDVRKMIAKSEQEIGKATAKYFFYSNIMNFFKTEITLANGEIRKRPLIETNGETGEIVWDKGRDFATVRKVLSMPQVNIVKKTEVQTGGFSKESILPKRNSDKLIARKKDWDPKKYGGFDSPTVAYSVLVVAKVEKGKSKKLKSVKELLGITIMERSSFEKNPIDFLEAKGYKEVKKDLIIKLPKYSLFELENGRKRMLASAGELQKGNELALPSKYVNFLYLASHYEKLKGSPEDNEQKQLFVEQHKHYLDEIIEQISEFSKRVILADANLDKVLSAYNKHRDKPIREQAENIIHLFTLTNLGAPAAFKYFDTTIDRKRYTSTKEVLDATLIHQSITGLYETRIDLSQLGGDGGGSSPAPEAAAKGGTLNIEDEHRLHETSKEPDVSLGSTWLSDFPQAWAETGGMGLAVRQAPLIIPLKATSTPVSIKQYPMSQEARLGIKPHIQRLLDQGILVPCQSPWNTPLLPVKKPGTNDYRPVQDLREVNKRVEDIHPTVPNPYNLLSGLPPSHQWYTVLDLKDAFFCLRLHPTSQPLFAFEWRDPEMGISGQLTWTRLPQGFKNSPTLFDEALHRDLADFRIQHPDLILLQYVDDLLLAATSELDCQQGTRALLQTLGNLGYRASAKKAQICQKQVKYLGYLLKEGQRWLTEARKETVMGQPTPKTPRQLREFLGTAGFCRLWIPGFAEMAAPLYPLTKTGTLFNWGPDQQKAYQEIKQALLTAPALGLPDLTKPFELFVDEKQGYAKGVLTQKLGPWRRPVAYLSKKLDPVAAGWPPCLRMVAAIAVLTKDAGKLTMGQPLVILAPHAVEALVKQPPDRWLSNARMTHYQALLLDTDRVQFGPVVALNPATLLPLPEEGLQHNCLDILAEAHGTRPDLTDQPLPDADHTWYTDGSSLLQEGQRKAGAAVTTETEVIWAKALPAGTSAQRAELIALTQALKMAEGKKLNVYTDSRYAFATAHIHGEIYRRRGLLTSEGKEIKNKDEILALLKALFLPKRLSIIHCPGHQKGHSAEARGNRMADQAARKAAITETPDTSTLLAGKRTADGSEFEKRTADGSEFESPKKKAKVE

SEQ ID NO: 7594 - protein, 2096 aa, synthetic construct; identical to SEQ ID NO: 7593

SEQ ID NO: 7595 - protein, 2096 aa, synthetic construct
MPAAKRVKLDGGDKKYSIGLDIGTNSVGWAVITDEYKVPSKKFKVLGNTDRHSIKKNLIGALLFDSGETAEATRLKRTARRRYTRRKNRICYLQEIFSNEMAKVDDSFFHRLEESFLVEEDKKHERHPIFGNIVDEVAYHEKYPTIYHLRKKLVDSTDKADLRLIYLALAHMIKFRGHFLIEGDLNPDNSDVDKLFIQLVQTYNQLFEENPINASGVDAKAILSARLSKSRRLENLIAQLPGEKKNGLFGNLIALSLGLTPNFKSNFDLAEDAKLQLSKDTYDDDLDNLLAQIGDQYADLFLAAKNLSDAILLSDILRVNTEITKAPLSASMIKRYDEHHQDLTLLKALVRQQLPEKYKEIFFDQSKNGYAGYIDGGASQEEFYKFIKPILEKMDGTEELLVKLNREDLLRKQRTFDNGSIPHQIHLGELHAILRRQEDFYPFLKDNREKIEKILTFRIPYYVGPLARGNSRFAWMTRKSEETITPWNFEEVVDKGASAQSFIERMTNFDKNLPNEKVLPKHSLLYEYFTVYNELTKVKYVTEGMRKPAFLSGEQKKAIVDLLFKTNRKVTVKQLKEDYFKKIECFDSVEISGVEDRFNASLGTYHDLLKIIKDKDFLDNEENEDILEDIVLTLTLFEDREMIEERLKTYAHLFDDKVMKQLKRRRYTGWGRLSRKLINGIRDKQSGKTILDFLKSDGFANRNFMQLIHDDSLTFKEDIQKAQVSGQGDSLHEHIANLAGSPAIKKGILQTVKVVDELVKVMGRHKPENIVIEMARENQTTQKGQKNSRERMKRIEEGIKELGSQILKEHPVENTQLQNEKLYLYYLQNGRDMYVDQELDINRLSDYDVDHIVPQSFLKDDSIDNKVLTRSDKARGKSDNVPSEEVVKKMKNYWRQLLNAKLITQRKFDNLTKAERGGLSELDKAGFIKRQLVETRQITKHVAQILDSRMNTKYDENDKLIREVKVITLKSKLVSDFRKDFQFYKVREINNYHHAHDAYLNAVVGTALIKKYPKLESEFVYGDYKVYDVRKMIAKSEQEIGKATAKYFFYSNIMNFFKTEITLANGEIRKRPLIETNGETGEIVWDKGRDFATVRKVLSMPQVNIVKKTEVQTGGFSKESILPKRNSDKLIARKKDWDPKKYGGFDSPTVAYSVLVVAKVEKGKSKKLKSVKELLGITIMERSSFEKNPIDFLEAKGYKEVKKDLIIKLPKYSLFELENGRKRMLASAGELQKGNELALPSKYVNFLYLASHYEKLKGSPEDNEQKQLFVEQHKHYLDEIIEQISEFSKRVILADANLDKVLSAYNKHRDKPIREQAENIIHLFTLTNLGAPAAFKYFDTTIDRKRYTSTKEVLDATLIHQSITGLYETRIDLSQLGGDGGGSSPAPEAAAKGGTLNIEDEYRLHEISTEPDVSPGSTWLSDFPQAWAETGGMGLAVRQAPLIIPLKATSTPVSIKQYPMSQEAKLGIKPHIQRLLDQGILVPCQSPWNTPLLPVKKPGTNDYRPVQGLREVNKRVEDIHPTVPNPYNLLSGLPTSHRWYTVLDLKDAFFCLRLHPTSQPLFASEWRDPGMGISGQLTWTRLPQGFKNSPTLFNEALHRGLADFRIQHPDLILLQYVDDLLLAATSELDCQQGTRALLKTLGNLGYRASAKKAQICQKQVKYLGYLLREGQRWLTEARKETVMGQPTPKTPRQLREFLGTAGFCRLWIPRFAEMAAPLYPLTKPGTLFNWGPDQQKAYHEIKQALLTAPALGLPDLTKPFELFVDEKQGYAKGVLTQKLGPWRRPVAYLSKKLDPVAAGWPPCLRMVAAIAVLTKDAGKLTMGQPLVILAPHAVEALVKQPPDRWLSNARMTHYQAMLLDTDRVQFGPVVALNPATLLPLPEEGAPHDCLEILAETHGTEPDLTDQPIPDADHTWYTDGSSFLQEGQRKAGAAVTTETEVIWARALPAGTSAQRAELIALTQALKMAEGKRLNVYTDSRYAFATAHIHGEIYKRRGWLTSEGREIKNKSEILALLKALFLPKRLSIIHCLGHQKGDSAEARGNRLADQAAREAAIKTPPDTSTLLAGKRTADGSEFEKRTADGSEFESPKKKAKVE

SEQ ID NO: 7596 - protein, 2090 aa, synthetic construct
MPAAKRVKLDGGDKKYSIGLDIGTNSVGWAVITDEYKVPSKKFKVLGNTDRHSIKKNLIGALLFDSGETAEATRLKRTARRRYTRRKNRICYLQEIFSNEMAKVDDSFFHRLEESFLVEEDKKHERHPIFGNIVDEVAYHEKYPTIYHLRKKLVDSTDKADLRLIYLALAHMIKFRGHFLIEGDLNPDNSDVDKLFIQLVQTYNQLFEENPINASGVDAKAILSARLSKSRRLENLIAQLPGEKKNGLFGNLIALSLGLTPNFKSNFDLAEDAKLQLSKDTYDDDLDNLLAQIGDQYADLFLAAKNLSDAILLSDILRVNTEITKAPLSASMIKRYDEHHQDLTLLKALVRQQLPEKYKEIFFDQSKNGYAGYIDGGASQEEFYKFIKPILEKMDGTEELLVKLNREDLLRKQRTFDNGSIPHQIHLGELHAILRRQEDFYPFLKDNREKIEKILTFRIPYYVGPLARGNSRFAWMTRKSEETITPWNFEEVVDKGASAQSFIERMTNFDKNLPNEKVLPKHSLLYEYFTVYNELTKVKYVTEGMRKPAFLSGEQKKAIVDLLFKTNRKVTVKQLKEDYFKKIECFDSVEISGVEDRFNASLGTYHDLLKIIKDKDFLDNEENEDILEDIVLTLTLFEDREMIEERLKTYAHLFDDKVMKQLKRRRYTGWGRLSRKLINGIRDKQSGKTILDFLKSDGFANRNFMQLIHDDSLTFKEDIQKAQVSGQGDSLHEHIANLAGSPAIKKGILQTVKVVDELVKVMGRHKPENIVIEMARENQTTQKGQKNSRERMKRIEEGIKELGSQILKEHPVENTQLQNEKLYLYYLQNGRDMYVDQELDINRLSDYDVDHIVPQSFLKDDSIDNKVLTRSDKARGKSDNVPSEEVVKKMKNYWRQLLNAKLITQRKFDNLTKAERGGLSELDKAGFIKRQLVETRQITKHVAQILDSRMNTKYDENDKLIREVKVITLKSKLVSDFRKDFQFYKVREINNYHHAHDAYLNAVVGTALIKKYPKLESEFVYGDYKVYDVRKMIAKSEQEIGKATAKYFFYSNIMNFFKTEITLANGEIRKRPLIETNGETGEIVWDKGRDFATVRKVLSMPQVNIVKKTEVQTGGFSKESILPKRNSDKLIARKKDWDPKKYGGFDSPTVAYSVLVVAKVEKGKSKKLKSVKELLGITIMERSSFEKNPIDFLEAKGYKEVKKDLIIKLPKYSLFELENGRKRMLASAGELQKGNELALPSKYVNFLYLASHYEKLKGSPEDNEQKQLFVEQHKHYLDEIIEQISEFSKRVILADANLDKVLSAYNKHRDKPIREQAENIIHLFTLTNLGAPAAFKYFDTTIDRKRYTSTKEVLDATLIHQSITGLYETRIDLSQLGGDGGGSSPAPEAAAKGGTLQLDDEYRLYSPLVKPDQNIQFWLEQFPQAWAETAGMGLAKQVPPQVIQLKASATPVSVRQYPLSKEAQEGIRPHVQRLIQQGILVPVQSPWNTPLLPVRKPGTNDYRPVQDLREVNKRVQDIHPTVPNPYNLLCALPPQRSWYTVLDLKDAFFCLRLHPTSQPLFAFEWRDPGTGRTGQLTWTRLPQGFKNSPTIFDEALHRDLANFRIQHPQVTLLQYVDDLLLAGATKQDCLEGTKALLLELSDLGYRASAKKAQICRREVTYLGYSLRDGQRWLTEARKKTVVQIPAPTTAKQVREFLGTAGFCRLWIPGFATLAAPLYPLTKEKGEFSWAPEHQKAFDAIKKALLSAPALALPDVTKPFTLYVDERKGVARGVLTQTLGPWRRPVAYLSKKLDPVASGWPVCLKAIAAVAILVKDADKLTLGQNITVIAPHALENIVRQPPDRWMTNARMTHYQSLLLTERVTFAPPAALNPATLLPEETDEPVTHDCHQLLIEETGVRKDLTDIPLTGEVLTWFTDGSSYVVEGKRMAGAAVVDGTRTIWASSLPEGTSAQKAELMALTQALRLAEGKSINIYTDSRYAFATAHVHGAIYKQRGLLTSAGREIKNKEEILSLLEALHLPKRLAIIHCPGHQKAKDPISRGNQMADRVAKQAAQGVNLLAGKRTADGSEFEKRTADGSEFESPKKKAKVE

SEQ ID NO: 7597 - protein, 2090 aa, synthetic construct; identical to SEQ ID NO: 7596

SEQ ID NO: 7598 - protein, 2176 aa, synthetic construct
MPAAKRVKLDGGDKKYSIGLDIGTNSVGWAVITDEYKVPSKKFKVLGNTDRHSIKKNLIGALLFDSGETAEATRLKRTARRRYTRRKNRICYLQEIFSNEMAKVDDSFFHRLEESFLVEEDKKHERHPIFGNIVDEVAYHEKYPTIYHLRKKLVDSTDKADLRLIYLALAHMIKFRGHFLIEGDLNPDNSDVDKLFIQLVQTYNQLFEENPINASGVDAKAILSARLSKSRRLENLIAQLPGEKKNGLFGNLIALSLGLTPNFKSNFDLAEDAKLQLSKDTYDDDLDNLLAQIGDQYADLFLAAKNLSDAILLSDILRVNTEITKAPLSASMIKRYDEHHQDLTLLKALVRQQLPEKYKEIFFDQSKNGYAGYIDGGASQEEFYKFIKPILEKMDGTEELLVKLNREDLLRKQRTFDNGSIPHQIHLGELHAILRRQEDFYPFLKDNREKIEKILTFRIPYYVGPLARGNSRFAWMTRKSEETITPWNFEEVVDKGASAQSFIERMTNFDKNLPNEKVLPKHSLLYEYFTVYNELTKVKYVTEGMRKPAFLSGEQKKAIVDLLFKTNRKVTVKQLKEDYFKKIECFDSVEISGVEDRFNASLGTYHDLLKIIKDKDFLDNEENEDILEDIVLTLTLFEDREMIEERLKTYAHLFDDKVMKQLKRRRYTGWGRLSRKLINGIRDKQSGKTILDFLKSDGFANRNFMQLIHDDSLTFKEDIQKAQVSGQGDSLHEHIANLAGSPAIKKGILQTVKVVDELVKVMGRHKPENIVIEMARENQTTQKGQKNSRERMKRIEEGIKELGSQILKEHPVENTQLQNEKLYLYYLQNGRDMYVDQELDINRLSDYDVDHIVPQSFLKDDSIDNKVLTRSDKARGKSDNVPSEEVVKKMKNYWRQLLNAKLITQRKFDNLTKAERGGLSELDKAGFIKRQLVETRQITKHVAQILDSRMNTKYDENDKLIREVKVITLKSKLVSDFRKDFQFYKVREINNYHHAHDAYLNAVVGTALIKKYPKLESEFVYGDYKVYDVRKMIAKSEQEIGKATAKYFFYSNIMNFFKTEITLANGEIRKRPLIETNGETGEIVWDKGRDFATVRKVLSMPQVNIVKKTEVQTGGFSKESILPKRNSDKLIARKKDWDPKKYGGFDSPTVAYSVLVVAKVEKGKSKKLKSVKELLGITIMERSSFEKNPIDFLEAKGYKEVKKDLIIKLPKYSLFELENGRKRMLASAGELQKGNELALPSKYVNFLYLASHYEKLKGSPEDNEQKQLFVEQHKHYLDEIIEQISEFSKRVILADANLDKVLSAYNKHRDKPIREQAENIIHLFTLTNLGAPAAFKYFDTTIDRKRYTSTKEVLDATLIHQSITGLYETRIDLSQLGGDGGGSSPAPEAAAKGGMDPLQLLQPLEAEIKGTKLKAHWNSGATITCVPEAFLEDERPIQTMLIKTIHGEKQQDVYYLTFKVQGRKVEAEVLASPYDYILLNPSDVPWLMKKPLQLTVLVPLHEYQERLLQQTALPKEQKELLQKLFLKYDALWQHWENQVGHRRIKPHNIATGTLAPRPQKQYPINPKAKPSIQIVIDDLLKQGVLIQQNSTMNTPVYPVPKPDGKWRMVLDYREVNKTIPLIAAQNQHSAGILSSIYRGKYKTTLDLTNGFWAHPITPESYWLTAFTWQGKQYCWTRLPQGFLNSPALFTADVVDLLKEIPNVQAYVDDIYISHDDPQEHLEQLEKIFSILLNAGYVVSLKKSEIAQREVEFLGFNITKEGRGLTDTFKQKLLNITPPKDLKQLQSILGLLNFARNFIPNYSELVKPLYTIVANANGKFISWTEDNSNQLQHIISVLNQADNLEERNPETRLIIKVNSSPSAGYIRYYNEGSKRPIMYVNYIFSKAEAKFTQTEKLLTTMHKGLIKAMDLAMGQEILVYSPIVSMTKIQRTPLPERKALPVRWITWMTYLEDPRIQFHYDKSLPELQQIPNVTEDVIAKTKHPSEFAMVFYTDGSAIKHPDVNKSHSAGMGIAQVQFIPEYKIVHQWSIPLGDHTAQLAEIAAVEFACKKALKISGPVLIVTDSFYVAESANKELPYWKSNGFLNNKKKPLRHVSKWKSIAECLQLKPDIIIMHEKGHQQPMTTLHTEGNNLADKLATQGSYVVHAGKRTADGSEFEKRTADGSEFESPKKKAKVE

SEQ ID NO: 7599 - protein, 2087 aa, synthetic construct
MPAAKRVKLDGGDKKYSIGLDIGTNSVGWAVITDEYKVPSKKFKVLGNTDRHSIKKNLIGALLFDSGETAEATRLKRTARRRYTRRKNRICYLQEIFSNEMAKVDDSFFHRLEESFLVEEDKKHERHPIFGNIVDEVAYHEKYPTIYHLRKKLVDSTDKADLRLIYLALAHMIKFRGHFLIEGDLNPDNSDVDKLFIQLVQTYNQLFEENPINASGVDAKAILSARLSKSRRLENLIAQLPGEKKNGLFGNLIALSLGLTPNFKSNFDLAEDAKLQLSKDTYDDDLDNLLAQIGDQYADLFLAAKNLSDAILLSDILRVNTEITKAPLSASMIKRYDEHHQDLTLLKALVRQQLPEKYKEIFFDQSKNGYAGYIDGGASQEEFYKFIKPILEKMDGTEELLVKLNREDLLRKQRTFDNGSIPHQIHLGELHAILRRQEDFYPFLKDNREKIEKILTFRIPYYVGPLARGNSRFAWMTRKSEETITPWNFEEVVDKGASAQSFIERMTNFDKNLPNEKVLPKHSLLYEYFTVYNELTKVKYVTEGMRKPAFLSGEQKKAIVDLLFKTNRKVTVKQLKEDYFKKIECFDSVEISGVEDRFNASLGTYHDLLKIIKDKDFLDNEENEDILEDIVLTLTLFEDREMIEERLKTYAHLFDDKVMKQLKRRRYTGWGRLSRKLINGIRDKQSGKTILDFLKSDGFANRNFMQLIHDDSLTFKEDIQKAQVSGQGDSLHEHIANLAGSPAIKKGILQTVKVVDELVKVMGRHKPENIVIEMARENQTTQKGQKNSRERMKRIEEGIKELGSQILKEHPVENTQLQNEKLYLYYLQNGRDMYVDQELDINRLSDYDVDHIVPQSFLKDDSIDNKVLTRSDKARGKSDNVPSEEVVKKMKNYWRQLLNAKLITQRKFDNLTKAERGGLSELDKAGFIKRQLVETRQITKHVAQILDSRMNTKYDENDKLIREVKVITLKSKLVSDFRKDFQFYKVREINNYHHAHDAYLNAVVGTALIKKYPKLESEFVYGDYKVYDVRKMIAKSEQEIGKATAKYFFYSNIMNFFKTEITLANGEIRKRPLIETNGETGEIVWDKGRDFATVRKVLSMPQVNIVKKTEVQTGGFSKESILPKRNSDKLIARKKDWDPKKYGGFDSPTVAYSVLVVAKVEKGKSKKLKSVKELLGITIMERSSFEKNPIDFLEAKGYKEVKKDLIIKLPKYSLFELENGRKRMLASAGELQKGNELALPSKYVNFLYLASHYEKLKGSPEDNEQKQLFVEQHKHYLDEIIEQISEFSKRVILADANLDKVLSAYNKHRDKPIREQAENIIHLFTLTNLGAPAAFKYFDTTIDRKRYTSTKEVLDATLIHQSITGLYETRIDLSQLGGDGGGSSPAPEAAAKGGIPWLMKKPLQLTTLVPLQEYEERLLKQTMLTGSYKEKLQSLFLKYDALWQHWENQVGHRRIKPHHIATGTVNPRPQKQYPINPKAKASIQTVINDLLKQGVLIQQNSIMNTPVYPVPKPDGKWRMVLDYREVNKTIPLIAAQNQHSAGILSSIFRGKYKTTLDLSNGFWAHSITPESYWLTAFTWLGQQYCWTRLPQGFLNSPALFNADVVDLLKEVPNVQVYVDDIYISHDDPREHLEQLEKVFSLLLNAGYVVSLKKSEIAQHEVEFLGFNITKEGRGLTETFKQKLLNITPPRDLKQLQSILGKLNFARNFIPNFSELVKPLYNIIATAPGKYITWTTDNSQQLQNIISMLNSAENLEERNPEVRLIMKVNTSPSAGYIRFYNEFAKRPIMYLNYVYTKAEVKFTNTEKLLTTIHKGLIKALDLGMGQEILVYSPIVSMTKIQKTPLPERKALPIRWITWMSYLEDPRIQFHYDKTLPELQQVPTVTDDIIAKIKHPSEFSMVFYTDGSAIKHPNVNKSHNAGMGIAQVQFKPEFTVINTWSIPLGDHTAQLAEVAAVEFACKKALKIDGPVLIVTDSFYVAESVNKELPYWQSNGFFNNKKKPLKHVSKWKSIADCIQLKPDIIIIHEKGHQPTASTFHTEGNNLADKLATQGSYVVNAGKRTADGSEFEKRTADGSEFESPKKKAKVE

SEQ ID NO: 7600 - protein, 2096 aa, synthetic construct
MPAAKRVKLDGGDKKYSIGLDIGTNSVGWAVITDEYKVPSKKFKVLGNTDRHSIKKNLIGALLFDSGETAEATRLKRTARRRYTRRKNRICYLQEIFSNEMAKVDDSFFHRLEESFLVEEDKKHERHPIFGNIVDEVAYHEKYPTIYHLRKKLVDSTDKADLRLIYLALAHMIKFRGHFLIEGDLNPDNSDVDKLFIQLVQTYNQLFEENPINASGVDAKAILSARLSKSRRLENLIAQLPGEKKNGLFGNLIALSLGLTPNFKSNFDLAEDAKLQLSKDTYDDDLDNLLAQIGDQYADLFLAAKNLSDAILLSDILRVNTEITKAPLSASMIKRYDEHHQDLTLLKALVRQQLPEKYKEIFFDQSKNGYAGYIDGGASQEEFYKFIKPILEKMDGTEELLVKLNREDLLRKQRTFDNGSIPHQIHLGELHAILRRQEDFYPFLKDNREKIEKILTFRIPYYVGPLARGNSRFAWMTRKSEETITPWNFEEVVDKGASAQSFIERMTNFDKNLPNEKVLPKHSLLYEYFTVYNELTKVKYVTEGMRKPAFLSGEQKKAIVDLLFKTNRKVTVKQLKEDYFKKIECFDSVEISGVEDRFNASLGTYHDLLKIIKDKDFLDNEENEDILEDIVLTLTLFEDREMIEERLKTYAHLFDDKVMKQLKRRRYTGWGRLSRKLINGIRDKQSGKTILDFLKSDGFANRNFMQLIHDDSLTFKEDIQKAQVSGQGDSLHEHIANLAGSPAIKKGILQTVKVVDELVKVMGRHKPENIVIEMARENQTTQKGQKNSRERMKRIEEGIKELGSQILKEHPVENTQLQNEKLYLYYLQNGRDMYVDQELDINRLSDYDVDHIVPQSFLKDDSIDNKVLTRSDKARGKSDNVPSEEVVKKMKNYWRQLLNAKLITQRKFDNLTKAERGGLSELDKAGFIKRQLVETRQITKHVAQILDSRMNTKYDENDKLIREVKVITLKSKLVSDFRKDFQFYKVREINNYHHAHDAYLNAVVGTALIKKYPKLESEFVYGDYKVYDVRKMIAKSEQEIGKATAKYFFYSNIMNFFKTEITLANGEIRKRPLIETNGETGEIVWDKGRDFATVRKVLSMPQVNIVKKTEVQTGGFSKESILPKRNSDKLIARKKDWDPKKYGGFDSPTVAYSVLVVAKVEKGKSKKLKSVKELLGITIMERSSFEKNPIDFLEAKGYKEVKKDLIIKLPKYSLFELENGRKRMLASAGELQKGNELALPSKYVNFLYLASHYEKLKGSPEDNEQKQLFVEQHKHYLDEIIEQISEFSKRVILADANLDKVLSAYNKHRDKPIREQAENIIHLFTLTNLGAPAAFKYFDTTIDRKRYTSTKEVLDATLIHQSITGLYETRIDLSQLGGDGGGSSPAPEAAAKGGTLNIEDEYRLHETSKEPDVPLGSTWLSDFPQAWAETGGMGLAVRQAPLIIPLKATSTPVSIKQYPMSQEARLGIKPHIQRLLDQGILVPCQSPWNTPLLPVKKPGTNDYRPVQDLREVNKRVEDIHPTVPNPYNLLSGLPPSHQWYTVLDLKDAFFCLRLHPTSQPLFAFEWRDPEMGISGQLTWTRLPQGFKNSPTLFNEALHRDLADFRIQHPDLILLQYVDDLLLAATSEQDCQRGTRALLQTLGNLGYRASAKKAQICQKQVKYLGYLLKEGQRWLTEARKETVMGQPTPKTPRQLREFLGTAGFCRLWIPGFAEMAAPLYPLTKPGTLFNWGPDQQKAYQEIKQALLTAPALGLPDLTKPFELFVDEKQGYAKGVLTQKLGPWRRPVAYLSKKLDPVAAGWPPCLRMVAAIAVLTKDAGKLTMGQPLVILAPHAVEALVKQPPDRWLSNARMTHYQAMLLDTDRVQFGPVVALNPATLLPLPEKEAPHDCLEILAETHGTRPDLTDQPIPDADYTWYTDGSSFLQEGQRRAGAAVTTETEVIWARALPAGTSAQRAELIALTQALKMAEGKKLNVYTDSRYAFATAHVHGEIYRRRGWLTSEGREIKNKNEILALLKALFLPKRLSIIHCPGHQKGNSAEARGNRMADQAAREAAMKAVLETSTLLAGKRTADGSEFEKRTADGSEFESPKKKAKVE

SEQ ID NO: 7601 - protein, 2087 aa, synthetic construct
MPAAKRVKLDGGDKKYSIGLDIGTNSVGWAVITDEYKVPSKKFKVLGNTDRHSIKKNLIGALLFDSGETAEATRLKRTARRRYTRRKNRICYLQEIFSNEMAKVDDSFFHRLEESFLVEEDKKHERHPIFGNIVDEVAYHEKYPTIYHLRKKLVDSTDKADLRLIYLALAHMIKFRGHFLIEGDLNPDNSDVDKLFIQLVQTYNQLFEENPINASGVDAKAILSARLSKSRRLENLIAQLPGEKKNGLFGNLIALSLGLTPNFKSNFDLAEDAKLQLSKDTYDDDLDNLLAQIGDQYADLFLAAKNLSDAILLSDILRVNTEITKAPLSASMIKRYDEHHQDLTLLKALVRQQLPEKYKEIFFDQSKNGYAGYIDGGASQEEFYKFIKPILEKMDGTEELLVKLNREDLLRKQRTFDNGSIPHQIHLGELHAILRRQEDFYPFLKDNREKIEKILTFRIPYYVGPLARGNSRFAWMTRKSEETITPWNFEEVVDKGASAQSFIERMTNFDKNLPNEKVLPKHSLLYEYFTVYNELTKVKYVTEGMRKPAFLSGEQKKAIVDLLFKTNRKVTVKQLKEDYFKKIECFDSVEISGVEDRFNASLGTYHDLLKIIKDKDFLDNEENEDILEDIVLTLTLFEDREMIEERLKTYAHLFDDKVMKQLKRRRYTGWGRLSRKLINGIRDKQSGKTILDFLKSDGFANRNFMQLIHDDSLTFKEDIQKAQVSGQGDSLHEHIANLAGSPAIKKGILQTVKVVDELVKVMGRHKPENIVIEMARENQTTQKGQKNSRERMKRIEEGIKELGSQILKEHPVENTQLQNEKLYLYYLQNGRDMYVDQELDINRLSDYDVDHIVPQSFLKDDSIDNKVLTRSDKARGKSDNVPSEEVVKKMKNYWRQLLNAKLITQRKFDNLTKAERGGLSELDKAGFIKRQLVETRQITKHVAQILDSRMNTKYDENDKLIREVKVITLKSKLVSDFRKDFQFYKVREINNYHHAHDAYLNAVVGTALIKKYPKLESEFVYGDYKVYDVRKMIAKSEQEIGKATAKYFFYSNIMNFFKTEITLANGEIRKRPLIETNGETGEIVWDKGRDFATVRKVLSMPQVNIVKKTEVQTGGFSKESILPKRNSDKLIARKKDWDPKKYGGFDSPTVAYSVLVVAKVEKGKSKKLKSVKELLGITIMERSSFEKNPIDFLEAKGYKEVKKDLIIKLPKYSLFELENGRKRMLASAGELQKGNELALPSKYVNFLYLASHYEKLKGSPEDNEQKQLFVEQHKHYLDEIIEQISEFSKRVILADANLDKVLSAYNKHRDKPIREQAENIIHLFTLTNLGAPAAFKYFDTTIDRKRYTSTKEVLDATLIHQSITGLYETRIDLSQLGGDGGEAAAKGSSPAPGGVPWILKKPLELTIKLDLEEQQGTLLNNSILSKKGKEELKQLFEKYSALWQSWENQVGHRRIRPHKIATGTVKPTPQKQYHINPKAKPDIQIVINDLLKQGVLIQKESTMNTPVYPVPKPNGRWRMVLDYRAVNKVTPLIAVQNQHSYGILGSLFKGRYKTTIDLSNGFWAHPIVPEDYWITAFTWQGKQYCWTVLPQGFLNSPGLFTGDVVDLLQGIPNVEVYVDDVYISHDSEKEHLEYLDILFNRLKEAGYIISLKKSNIANSIVDFLGFQITNEGRGLTDTFKEKLENITAPTTLKQLQSILGLLNFARNFIPDFTELIAPLYALIPKSTKNYVPWQIEHSTTLETLITKLNGAEYLQGRKGDKTLIMKVNASYTTGYIRYYNEGEKKPISYVSIVFSKTELKFTELEKLLTTVHKGLLKALDLSMGQNIHVYSPIVSMQNIQKTPQTAKKALASRWLSWLSYLEDPRIRFFYDPQMPALKDLPAVDTGKDNKKHPSNFQHIFYTDGSAITSPTKEGHLNAGMGIVYFINKDGNLQKQQEWSISLGNHTAQFAEIAAFEFALKKCLPLGGNILVVTDSNYVAKAYNEELDVWASNGFVNNRKKPLKHISKWKSVADLKRLRPDVVVTHEPGHQKLDSSPHAYGNNLADQLATQASFKVHAGKRTADGSEFEKRTADGSEFESPKKKAKVE

SEQ ID NO: 7602 - protein, 2087 aa, synthetic construct
MPAAKRVKLDGGDKKYSIGLDIGTNSVGWAVITDEYKVPSKKFKVLGNTDRHSIKKNLIGALLFDSGETAEATRLKRTARRRYTRRKNRICYLQEIFSNEMAKVDDSFFHRLEESFLVEEDKKHERHPIFGNIVDEVAYHEKYPTIYHLRKKLVDSTDKADLRLIYLALAHMIKFRGHFLIEGDLNPDNSDVDKLFIQLVQTYNQLFEENPINASGVDAKAILSARLSKSRRLENLIAQLPGEKKNGLFGNLIALSLGLTPNFKSNFDLAEDAKLQLSKDTYDDDLDNLLAQIGDQYADLFLAAKNLSDAILLSDILRVNTEITKAPLSASMIKRYDEHHQDLTLLKALVRQQLPEKYKEIFFDQSKNGYAGYIDGGASQEEFYKFIKPILEKMDGTEELLVKLNREDLLRKQRTFDNGSIPHQIHLGELHAILRRQEDFYPFLKDNREKIEKILTFRIPYYVGPLARGNSRFAWMTRKSEETITPWNFEEVVDKGASAQSFIERMTNFDKNLPNEKVLPKHSLLYEYFTVYNELTKVKYVTEGMRKPAFLSGEQKKAIVDLLFKTNRKVTVKQLKEDYFKKIECFDSVEISGVEDRFNASLGTYHDLLKIIKDKDFLDNEENEDILEDIVLTLTLFEDREMIEERLKTYAHLFDDKVMKQLKRRRYTGWGRLSRKLINGIRDKQSGKTILDFLKSDGFANRNFMQLIHDDSLTFKEDIQKAQVSGQGDSLHEHIANLAGSPAIKKGILQTVKVVDELVKVMGRHKPENIVIEMARENQTTQKGQKNSRERMKRIEEGIKELGSQILKEHPVENTQLQNEKLYLYYLQNGRDMYVDQELDINRLSDYDVDHIVPQSFLKDDSIDNKVLTRSDKARGKSDNVPSEEVVKKMKNYWRQLLNAKLITQRKFDNLTKAERGGLSELDKAGFIKRQLVETRQITKHVAQILDSRMNTKYDENDKLIREVKVITLKSKLVSDFRKDFQFYKVREINNYHHAHDAYLNAVVGTALIKKYPKLESEFVYGDYKVYDVRKMIAKSEQEIGKATAKYFFYSNIMNFFKTEITLANGEIRKRPLIETNGETGEIVWDKGRDFATVRKVLSMPQVNIVKKTEVQTGGFSKESILPKRNSDKLIARKKDWDPKKYGGFDSPTVAYSVLVVAKVEKGKSKKLKSVKELLGITIMERSSFEKNPIDFLEAKGYKEVKKDLIIKLPKYSLFELENGRKRMLASAGELQKGNELALPSKYVNFLYLASHYEKLKGSPEDNEQKQLFVEQHKHYLDEIIEQISEFSKRVILADANLDKVLSAYNKHRDKPIREQAENIIHLFTLTNLGAPAAFKYFDTTIDRKRYTSTKEVLDATLIHQSITGLYETRIDLSQLGGDGGEAAAKGSSPAPGGVPWLTQQPLQLTILVPLQEYQEKILSKTALPEDQKQQLKTLFVKYDNLWQHWENQVGHRKIRPHNIATGDYPPRPQKQYPINPKAKPSIQIVIDDLLKQGVLTPQNSTMNTPVYPVPKPDGRWRMVLDYREVNKTIPLTAAQNQHSAGILATIVRQKYKTTLDLANGFWAHPITPESYWLTAFTWQGKQYCWTRLPQGFLNSPALFNADVVDLLKEIPNVQVYVDDIYLSHDDPKEHVQQLEKVFQILLQAGYVVSLKKSEIGQKTVEFLGFNITKEGRGLTDTFKTKLLNITPPKDLKQLQSILGKLNFARNFIPNFAELVQPLYNLIAPAKGKYIEWSEENTKQLNMVIEALNTASNLEERLPEQRLVIKVNTSPSAGYVRYYNETGKKPIMYLNYVFSKAELKFSMLEKLLTTMHKALIKAMDLAMGQEILVYSPIVSMTKIQKTPLPERKALPIRWITWMTYLEDPRIQFHYDKTLPELKHIPDVYTSSQSPVKHPSQYEGVFYTDGSAIKSPDPTKSNNAGMGIVHATYKPEYQVLNQWSIPLGNHTAQMAEIAAVEFACKKALKIPGPVLVITDSFYVAESANKELPYWKSNGFVNNKKKPLKHISKWKSIAECLSMKPDITIQHEKGISLQIPVFILKGNALADKLATQGSYVVNAGKRTADGSEFEKRTADGSEFESPKKKAKVE

SEQ ID NO: 7603 - protein, 2218 aa, synthetic construct
MPAAKRVKLDGGDKKYSIGLDIGTNSVGWAVITDEYKVPSKKFKVLGNTDRHSIKKNLIGALLFDSGETAEATRLKRTARRRYTRRKNRICYLQEIFSNEMAKVDDSFFHRLEESFLVEEDKKHERHPIFGNIVDEVAYHEKYPTIYHLRKKLVDSTDKADLRLIYLALAHMIKFRGHFLIEGDLNPDNSDVDKLFIQLVQTYNQLFEENPINASGVDAKAILSARLSKSRRLENLIAQLPGEKKNGLFGNLIALSLGLTPNFKSNFDLAEDAKLQLSKDTYDDDLDNLLAQIGDQYADLFLAAKNLSDAILLSDILRVNTEITKAPLSASMIKRYDEHHQDLTLLKALVRQQLPEKYKEIFFDQSKNGYAGYIDGGASQEEFYKFIKPILEKMDGTEELLVKLNREDLLRKQRTFDNGSIPHQIHLGELHAILRRQEDFYPFLKDNREKIEKILTFRIPYYVGPLARGNSRFAWMTRKSEETITPWNFEEVVDKGASAQSFIERMTNFDKNLPNEKVLPKHSLLYEYFTVYNELTKVKYVTEGMRKPAFLSGEQKKAIVDLLFKTNRKVTVKQLKEDYFKKIECFDSVEISGVEDRFNASLGTYHDLLKIIKDKDFLDNEENEDILEDIVLTLTLFEDREMIEERLKTYAHLFDDKVMKQLKRRRYTGWGRLSRKLINGIRDKQSGKTILDFLKSDGFANRNFMQLIHDDSLTFKEDIQKAQVSGQGDSLHEHIANLAGSPAIKKGILQTVKVVDELVKVMGRHKPENIVIEMARENQTTQKGQKNSRERMKRIEEGIKELGSQILKEHPVENTQLQNEKLYLYYLQNGRDMYVDQELDINRLSDYDVDHIVPQSFLKDDSIDNKVLTRSDKARGKSDNVPSEEVVKKMKNYWRQLLNAKLITQRKFDNLTKAERGGLSELDKAGFIKRQLVETRQITKHVAQILDSRMNTKYDENDKLIREVKVITLKSKLVSDFRKDFQFYKVREINNYHHAHDAYLNAVVGTALIKKYPKLESEFVYGDYKVYDVRKMIAKSEQEIGKATAKYFFYSNIMNFFKTEITLANGEIRKRPLIETNGETGEIVWDKGRDFATVRKVLSMPQVNIVKKTEVQTGGFSKESILPKRNSDKLIARKKDWDPKKYGGFDSPTVAYSVLVVAKVEKGKSKKLKSVKELLGITIMERSSFEKNPIDFLEAKGYKEVKKDLIIKLPKYSLFELENGRKRMLASAGELQKGNELALPSKYVNFLYLASHYEKLKGSPEDNEQKQLFVEQHKHYLDEIIEQISEFSKRVILADANLDKVLSAYNKHRDKPIREQAENIIHLFTLTNLGAPAAFKYFDTTIDRKRYTSTKEVLDATLIHQSITGLYETRIDLSQLGGDGGEAAAKGSSPAPGGTLGDQGSRGSDPLPEPRVTLTVEGIPTEFLVNTGAEHSVLTKPMGKMGSKRTVVAGATGSKVYPWTTKRLLKIGQKQVTHSFLVIPECPAPLLGRDLLTKLKAQIQFSTEGPQVTWEDRPAMCLVLNLEEEYRLHEKPVPPSIDPSWLQLFPMVWAEKAGMGLANQVPPVVVELKSDASPVAVRQYPMSKEAREGIRPHIQRFLDLGILVPCQSPWNTPLLPVKKPGTNDYRPVQDLREVNKRVQDIHPTVPNPYNLLSSLPPSHTWYSVLDLKDAFFCLKLHPNSQPLFAFEWRDPEKGNTGQLTWTRLPQGFKNSPTLFNEALHRDLASFRALNPQVVMLQYVDDLLVAAPTYRDCKEGTRRLLQELSKLGYRVSAKKAQLCREEVTYLGYLLKGGKRWLTPARKATVMKIPTPTTPRQVREFLGTAGFCRLWIPGFASLAAPLYPLTRPKVPFTWTEAHQEAFGRIKEALLSAPALALPDLTKPFALYVDEKEGVARGVLTQTLGPWRRPVAYLSKKLDPVASGWPTCLKAIAAVALLLKDADKLTLGQNVLVIAPHNLESIVRQPPDRWMTNARMTHYQSLLLNERVSFAPPAILNPATLLPVESDDTPIHICSEILAEETGTRPDLRDQPLPGVPAWYTDGSSFIMDGRRQAGAAIVDNKRTVWASNLPEGTSAQKAELIALTQALRLAEGKSINIYTDSRYAFATAHVHGAIYKQRGWLTSAGKDIKNKEEILALLEAIHLPKRVAIIHCPGHQRGTDPVATGNRKADEAAKQAAQSTRILTETTKNAGKRTADGSEFEKRTADGSEFESPKKKAKVE

SEQ ID NO: 7604 - protein, 2096 aa, synthetic construct
MPAAKRVKLDGGDKKYSIGLDIGTNSVGWAVITDEYKVPSKKFKVLGNTDRHSIKKNLIGALLFDSGETAEATRLKRTARRRYTRRKNRICYLQEIFSNEMAKVDDSFFHRLEESFLVEEDKKHERHPIFGNIVDEVAYHEKYPTIYHLRKKLVDSTDKADLRLIYLALAHMIKFRGHFLIEGDLNPDNSDVDKLFIQLVQTYNQLFEENPINASGVDAKAILSARLSKSRRLENLIAQLPGEKKNGLFGNLIALSLGLTPNFKSNFDLAEDAKLQLSKDTYDDDLDNLLAQIGDQYADLFLAAKNLSDAILLSDILRVNTEITKAPLSASMIKRYDEHHQDLTLLKALVRQQLPEKYKEIFFDQSKNGYAGYIDGGASQEEFYKFIKPILEKMDGTEELLVKLNREDLLRKQRTFDNGSIPHQIHLGELHAILRRQEDFYPFLKDNREKIEKILTFRIPYYVGPLARGNSRFAWMTRKSEETITPWNFEEVVDKGASAQSFIERMTNFDKNLPNEKVLPKHSLLYEYFTVYNELTKVKYVTEGMRKPAFLSGEQKKAIVDLLFKTNRKVTVKQLKEDYFKKIECFDSVEISGVEDRFNASLGTYHDLLKIIKDKDFLDNEENEDILEDIVLTLTLFEDREMIEERLKTYAHLFDDKVMKQLKRRRYTGWGRLSRKLINGIRDKQSGKTILDFLKSDGFANRNFMQLIHDDSLTFKEDIQKAQVSGQGDSLHEHIANLAGSPAIKKGILQTVKVVDELVKVMGRHKPENIVIEMARENQTTQKGQKNSRERMKRIEEGIKELGSQILKEHPVENTQLQNEKLYLYYLQNGRDMYVDQELDINRLSDYDVDHIVPQSFLKDDSIDNKVLTRSDKARGKSDNVPSEEVVKKMKNYWRQLLNAKLITQRKFDNLTKAERGGLSELDKAGFIKRQLVETRQITKHVAQILDSRMNTKYDENDKLIREVKVITLKSKLVSDFRKDFQFYKVREINNYHHAHDAYLNAVVGTALIKKYPKLESEFVYGDYKVYDVRKMIAKSEQEIGKATAKYFFYSNIMNFFKTEITLANGEIRKRPLIETNGETGEIVWDKGRDFATVRKVLSMPQVNIVKKTEVQTGGFSKESILPKRNSDKLIARKKDWDPKKYGGFDSPTVAYSVLVVAKVEKGKSKKLKSVKELLGITIMERSSFEKNPIDFLEAKGYKEVKKDLIIKLPKYSLFELENGRKRMLASAGELQKGNELALPSKYVNFLYLASHYEKLKGSPEDNEQKQLFVEQHKHYLDEIIEQISEFSKRVILADANLDKVLSAYNKHRDKPIREQAENIIHLFTLTNLGAPAAFKYFDTTIDRKRYTSTKEVLDATLIHQSITGLYETRIDLSQLGGDGGEAAAKGSSPAPGGTLNLEDEYRLYETSAEPEVSPGSTWLSDFPQAWAETGGMGLAVRQAPLIIPLKATSTPVSIKQYPMSQEAKLGIKPHIQRLLDQGILVPCQSPWNTPLLPVKKPGTNDYRPVQDLREVNKRVEDIHPTVPNPYNLLSGLPPSHRWYTVLDLKDAFFCLRLHPTSQPLFAFEWRDPGMGISGQLTWTRLPQGFKNSPTLFNEALHRDLADFRIQHPDLILLQYVDDILLAATSELDCQQGTRALLLTLGNLGYRASAKKAQLCQKQVKYLGYLLKEGQRWLTEARKETVMGQPTPKTPRQLREFLGTAGFCRLWIPGFAEMAAPLYPLTKPGTLFNWGPDQQKAYQEIKQALLTAPALGLPDLTKPFELFVDEKQGYAKGVLTQKLGPWRRPVAYLSKKLDPVAAGWPPCLRMVAAIAVLRKDAGKLTMGQPLVILAPHAVEALVKQPPDRWLSNARMTHYQAMLLDTDRVQFGPVVALNPATLLPLPEEGAPHDCLEILAETHGTRPDLTDQPIPDADHTWYTDGSSFLQEGQRKAGAAVTTETEVIWARALPAGTSAQRAELIALTQALKMAEGKRLNVYTDSRYAFATAHIHGEIYRRRGWLTSEGREIKNKSEILALLKALFLPKRLSIIHCLGHQKGDSAEARGNRLADQAAREAAIKTPPDTSTLLAGKRTADGSEFEKRTADGSEFESPKKKAKVE

SEQ ID NO: 7605 - protein, 2096 aa, synthetic construct
MPAAKRVKLDGGDKKYSIGLDIGTNSVGWAVITDEYKVPSKKFKVLGNTDRHSIKKNLIGALLFDSGETAEATRLKRTARRRYTRRKNRICYLQEIFSNEMAKVDDSFFHRLEESFLVEEDKKHERHPIFGNIVDEVAYHEKYPTIYHLRKKLVDSTDKADLRLIYLALAHMIKFRGHFLIEGDLNPDNSDVDKLFIQLVQTYNQLFEENPINASGVDAKAILSARLSKSRRLENLIAQLPGEKKNGLFGNLIALSLGLTPNFKSNFDLAEDAKLQLSKDTYDDDLDNLLAQIGDQYADLFLAAKNLSDAILLSDILRVNTEITKAPLSASMIKRYDEHHQDLTLLKALVRQQLPEKYKEIFFDQSKNGYAGYIDGGASQEEFYKFIKPILEKMDGTEELLVKLNREDLLRKQRTFDNGSIPHQIHLGELHAILRRQEDFYPFLKDNREKIEKILTFRIPYYVGPLARGNSRFAWMTRKSEETITPWNFEEVVDKGASAQSFIERMTNFDKNLPNEKVLPKHSLLYEYFTVYNELTKVKYVTEGMRKPAFLSGEQKKAIVDLLFKTNRKVTVKQLKEDYFKKIECFDSVEISGVEDRFNASLGTYHDLLKIIKDKDFLDNEENEDILEDIVLTLTLFEDREMIEERLKTYAHLFDDKVMKQLKRRRYTGWGRLSRKLINGIRDKQSGKTILDFLKSDGFANRNFMQLIHDDSLTFKEDIQKAQVSGQGDSLHEHIANLAGSPAIKKGILQTVKVVDELVKVMGRHKPENIVIEMARENQTTQKGQKNSRERMKRIEEGIKELGSQILKEHPVENTQLQNEKLYLYYLQNGRDMYVDQELDINRLSDYDVDHIVPQSFLKDDSIDNKVLTRSDKARGKSDNVPSEEVVKKMKNYWRQLLNAKLITQRKFDNLTKAERGGLSELDKAGFIKRQLVETRQITKHVAQILDSRMNTKYDENDKLIREVKVITLKSKLVSDFRKDFQFYKVREINNYHHAHDAYLNAVVGTALIKKYPKLESEFVYGDYKVYDVRKMIAKSEQEIGKATAKYFFYSNIMNFFKTEITLANGEIRKRPLIETNGETGEIVWDKGRDFATVRKVLSMPQVNIVKKTEVQTGGFSKESILPKRNSDKLIARKKDWDPKKYGGFDSPTVAYSVLVVAKVEKGKSKKLKSVKELLGITIMERSSFEKNPIDFLEAKGYKEVKKDLIIKLPKYSLFELENGRKRMLASAGELQKGNELALPSKYVNFLYLASHYEKLKGSPEDNEQKQLFVEQHKHYLDEIIEQISEFSKRVILADANLDKVLSAYNKHRDKPIREQAENIIHLFTLTNLGAPAAFKYFDTTIDRKRYTSTKEVLDATLIHQSITGLYETRIDLSQLGGDGGEAAAKGSSPAPGGTLNIEDEYRLHETSKEPDVSLGSTWLSDFPQAWAETGGMGLAVRQAPLIIPLKATSTPVSIKQYPMSQEARLGIKPHIQRLLDQGILVPCQSPWNTPLLPVKKPGTNDYRPVQDLREVNKRVEDIHPTVPNPYNLLSGLPPSHQWYTVLDLKDAFFCLRLHPTSQPLFAFEWRDPEMGISGQLTWTRLPQGFKNSPTLFDEALHRDLAGFRIQHPDLILLQYVDDLLLAATSELDCQQGTRALLQTLGDLGYRASAKKAQICQKQVKYLGYLLKEGQRWLTEARKETVMGQPIPKTPRQLREFLGTAGFCRLWIPGFAEMAAPLYPLTKTGTLFNWGPDQQKAFQEIKQALLTAPALGLPDLTKPFELFVDEKQGYAKGVLTQKLGPWRRPVAYLSKKLDPVAAGWPPCLRMVAAIAVLTKDAGKLTMGQPLVILAPHAVEALVKQPPDRWLSNARMTHYQALLLDTDRVQFGPVVALNPATLLPLPEEGLQHDCLDILAEAHGTRSDLMDQPLPDADHTWYTDGSSFLQEGQRKAGAAVTTETEVIWARALPAGTSAQRAELIALTQALKMAEGKKLNVYTDSRYAFATAHIHGEIYRRRGLLTSEGKEIKNKDEILALLKALFLPKRLSIIHCPGHQKGNSAEARGNRMADQAAREVATRETPETSTLLAGKRTADGSEFEKRTADGSEFESPKKKAKVE

SEQ ID NO: 7606 - protein, 2096 aa, synthetic construct
MPAAKRVKLDGGDKKYSIGLDIGTNSVGWAVITDEYKVPSKKFKVLGNTDRHSIKKNLIGALLFDSGETAEATRLKRTARRRYTRRKNRICYLQEIFSNEMAKVDDSFFHRLEESFLVEEDKKHERHPIFGNIVDEVAYHEKYPTIYHLRKKLVDSTDKADLRLIYLALAHMIKFRGHFLIEGDLNPDNSDVDKLFIQLVQTYNQLFEENPINASGVDAKAILSARLSKSRRLENLIAQLPGEKKNGLFGNLIALSLGLTPNFKSNFDLAEDAKLQLSKDTYDDDLDNLLAQIGDQYADLFLAAKNLSDAILLSDILRVNTEITKAPLSASMIKRYDEHHQDLTLLKALVRQQLPEKYKEIFFDQSKNGYAGYIDGGASQEEFYKFIKPILEKMDGTEELLVKLNREDLLRKQRTFDNGSIPHQIHLGELHAILRRQEDFYPFLKDNREKIEKILTFRIPYYVGPLARGNSRFAWMTRKSEETITPWNFEEVVDKGASAQSFIERMTNFDKNLPNEKVLPKHSLLYEYFTVYNELTKVKYVTEGMRKPAFLSGEQKKAIVDLLFKTNRKVTVKQLKEDYFKKIECFDSVEISGVEDRFNASLGTYHDLLKIIKDKDFLDNEENEDILEDIVLTLTLFEDREMIEERLKTYAHLFDDKVMKQLKRRRYTGWGRLSRKLINGIRDKQSGKTILDFLKSDGFANRNFMQLIHDDSLTFKEDIQKAQVSGQGDSLHEHIANLAGSPAIKKGILQTVKVVDELVKVMGRHKPENIVIEMARENQTTQKGQKNSRERMKRIEEGIKELGSQILKEHPVENTQLQNEKLYLYYLQNGRDMYVDQELDINRLSDYDVDHIVPQSFLKDDSIDNKVLTRSDKARGKSDNVPSEEVVKKMKNYWRQLLNAKLITQRKFDNLTKAERGGLSELDKAGFIKRQLVETRQITKHVAQILDSRMNTKYDENDKLIREVKVITLKSKLVSDFRKDFQFYKVREINNYHHAHDAYLNAVVGTALIKKYPKLESEFVYGDYKVYDVRKMIAKSEQEIGKATAKYFFYSNIMNFFKTEITLANGEIRKRPLIETNGETGEIVWDKGRDFATVRKVLSMPQVNIVKKTEVQTGGFSKESILPKRNSDKLIARKKDWDPKKYGGFDSPTVAYSVLVVAKVEKGKSKKLKSVKELLGITIMERSSFEKNPIDFLEAKGYKEVKKDLIIKLPKYSLFELENGRKRMLASAGELQKGNELALPSKYVNFLYLASHYEKLKGSPEDNEQKQLFVEQHKHYLDEIIEQISEFSKRVILADANLDKVLSAYNKHRDKPIREQAENIIHLFTLTNLGAPAAFKYFDTTIDRKRYTSTKEVLDATLIHQSITGLYETRIDLSQLGGDGGEAAAKGSSPAPGGTLNIEDEYRLHETSKEPDVSLGSTWLSDFPQAWAETGGMGLAVRQAPLIIPLKATSTPVSIKQYPMSQEARLGIKPHIQRLLDQGILVPCQSPWNTPLLPVKKPGTNDYRPVQDLREVNKRVEDIHPTVPNPYNLLSGLPPSHQWYTVLDLKDAFFCLRLHPTSQPLFAFEWRDPEMGISGQLTWTRLPQGFKNSPTLFNEALHRDLAGFRIQHPDLILLQYVDDLLLAATSELDCQQGTRALLQTLGDLGYRASAKKAQICQKQVKYLGYLLKEGQRWLTEARKETVMGQPIPKTPRQLREFLGKAGFCRLFIPGFAEMAAPLYPLTKPGTLFNWGPDQQKAFQEIKQALLTAPALGLPDLTKPFELFVDEKQGYAKGVLTQKLGPWRRPVAYLSKKLDPVAAGWPPCLRMVAAIAVLTKDAGKLTMGQPLVILAPHAVEALVKQPPDRWLSNARMTHYQALLLDTDRVQFGPVVALNPATLLPLPEEGLQHDCLDILAEAHGTRSDLMDQPLPDADHTWYTDGSSFLQEGQRKAGAAVTTETEVIWARALPAGTSAQRAELIALTQALKMAEGKKLNVYTDSRYAFATAHIHGEIYRRRGWLTSEGKEIKNKDEILALLKALFLPKRLSIIHCPGHQKGNSAEARGNRMADQAAREVATRETPETSTLLAGKRTADGSEFEKRTADGSEFESPKKKAKVE

SEQ ID NO: 7607 - protein, 2096 aa, synthetic construct
MPAAKRVKLDGGDKKYSIGLDIGTNSVGWAVITDEYKVPSKKFKVLGNTDRHSIKKNLIGALLFDSGETAEATRLKRTARRRYTRRKNRICYLQEIFSNEMAKVDDSFFHRLEESFLVEEDKKHERHPIFGNIVDEVAYHEKYPTIYHLRKKLVDSTDKADLRLIYLALAHMIKFRGHFLIEGDLNPDNSDVDKLFIQLVQTYNQLFEENPINASGVDAKAILSARLSKSRRLENLIAQLPGEKKNGLFGNLIALSLGLTPNFKSNFDLAEDAKLQLSKDTYDDDLDNLLAQIGDQYADLFLAAKNLSDAILLSDILRVNTEITKAPLSASMIKRYDEHHQDLTLLKALVRQQLPEKYKEIFFDQSKNGYAGYIDGGASQEEFYKFIKPILEKMDGTEELLVKLNREDLLRKQRTFDNGSIPHQIHLGELHAILRRQEDFYPFLKDNREKIEKILTFRIPYYVGPLARGNSRFAWMTRKSEETITPWNFEEVVDKGASAQSFIERMTNFDKNLPNEKVLPKHSLLYEYFTVYNELTKVKYVTEGMRKPAFLSGEQKKAIVDLLFKTNRKVTVKQLKEDYFKKIECFDSVEISGVEDRFNASLGTYHDLLKIIKDKDFLDNEENEDILEDIVLTLTLFEDREMIEERLKTYAHLFDDKVMKQLKRRRYTGWGRLSRKLINGIRDKQSGKTILDFLKSDGFANRNFMQLIHDDSLTFKEDIQKAQVSGQGDSLHEHIANLAGSPAIKKGILQTVKVVDELVKVMGRHKPENIVIEMARENQTTQKGQKNSRERMKRIEEGIKELGSQILKEHPVENTQLQNEKLYLYYLQNGRDMYVDQELDINRLSDYDVDHIVPQSFLKDDSIDNKVLTRSDKARGKSDNVPSEEVVKKMKNYWRQLLNAKLITQRKFDNLTKAERGGLSELDKAGFIKRQLVETRQITKHVAQILDSRMNTKYDENDKLIREVKVITLKSKLVSDFRKDFQFYKVREINNYHHAHDAYLNAVVGTALIKKYPKLESEFVYGDYKVYDVRKMIAKSEQEIGKATAKYFFYSNIMNFFKTEITLANGEIRKRPLIETNGETGEIVWDKGRDFATVRKVLSMPQVNIVKKTEVQTGGFSKESILPKRNSDKLIARKKDWDPKKYGGFDSPTVAYSVLVVAKVEKGKSKKLKSVKELLGITIMERSSFEKNPIDFLEAKGYKEVKKDLIIKLPKYSLFELENGRKRMLASAGELQKGNELALPSKYVNFLYLASHYEKLKGSPEDNEQKQLFVEQHKHYLDEIIEQISEFSKRVILADANLDKVLSAYNKHRDKPIREQAENIIHLFTLTNLGAPAAFKYFDTTIDRKRYTSTKEVLDATLIHQSITGLYETRIDLSQLGGDGGEAAAKGSSPAPGGTLNIEDEHRLHETSKEPDVSLGSTWLSDFPQAWAETGGMGLAVRQAPLIIPLKATSTPVSIKQYPMSQEARLGIKPHIQRLLDQGILVPCQSPWNTPLLPVKKPGTNDYRPVQDLREVNKRVEDIHPTVPNPYNLLSGLPPSHQWYTVLDLKDAFFCLRLHPTSQPLFAFEWRDPEMGISGQLTWTRLPQGFKNSPTLFDEALHRDLADFRIQHPDLILLQYVDDLLLAATSELDCQQGTRALLQTLGNLGYRASAKKAQICQKQVKYLGYLLKEGQRWLTEARKETVMGQPTPKTPRQLREFLGTAGFCRLWIPGFAEMAAPLYPLTKTGTLFNWGPDQQKAYQEIKQALLTAPALGLPDLTKPFELFVDEKQGYAKGVLTQKLGPWRRPVAYLSKKLDPVAAGWPPCLRMVAAIAVLTKDAGKLTMGQPLVILAPHAVEALVKQPPDRWLSNARMTHYQALLLDTDRVQFGPVVALNPATLLPLPEEGLQHNCLDILAEAHGTRPDLTDQPLPDADHTWYTDGSSLLQEGQRKAGAAVTTETEVIWAKALPAGTSAQRAELIALTQALKMAEGKKLNVYTDSRYAFATAHIHGEIYRRRGLLTSEGKEIKNKDEILALLKALFLPKRLSIIHCPGHQKGHSAEARGNRMADQAARKAAITETPDTSTLLAGKRTADGSEFEKRTADGSEFESPKKKAKVE

SEQ ID NO: 7608 - protein, 2024 aa, synthetic construct
MPAAKRVKLDGGDKKYSIGLDIGTNSVGWAVITDEYKVPSKKFKVLGNTDRHSIKKNLIGALLFDSGETAEATRLKRTARRRYTRRKNRICYLQEIFSNEMAKVDDSFFHRLEESFLVEEDKKHERHPIFGNIVDEVAYHEKYPTIYHLRKKLVDSTDKADLRLIYLALAHMIKFRGHFLIEGDLNPDNSDVDKLFIQLVQTYNQLFEENPINASGVDAKAILSARLSKSRRLENLIAQLPGEKKNGLFGNLIALSLGLTPNFKSNFDLAEDAKLQLSKDTYDDDLDNLLAQIGDQYADLFLAAKNLSDAILLSDILRVNTEITKAPLSASMIKRYDEHHQDLTLLKALVRQQLPEKYKEIFFDQSKNGYAGYIDGGASQEEFYKFIKPILEKMDGTEELLVKLNREDLLRKQRTFDNGSIPHQIHLGELHAILRRQEDFYPFLKDNREKIEKILTFRIPYYVGPLARGNSRFAWMTRKSEETITPWNFEEVVDKGASAQSFIERMTNFDKNLPNEKVLPKHSLLYEYFTVYNELTKVKYVTEGMRKPAFLSGEQKKAIVDLLFKTNRKVTVKQLKEDYFKKIECFDSVEISGVEDRFNASLGTYHDLLKIIKDKDFLDNEENEDILEDIVLTLTLFEDREMIEERLKTYAHLFDDKVMKQLKRRRYTGWGRLSRKLINGIRDKQSGKTILDFLKSDGFANRNFMQLIHDDSLTFKEDIQKAQVSGQGDSLHEHIANLAGSPAIKKGILQTVKVVDELVKVMGRHKPENIVIEMARENQTTQKGQKNSRERMKRIEEGIKELGSQILKEHPVENTQLQNEKLYLYYLQNGRDMYVDQELDINRLSDYDVDHIVPQSFLKDDSIDNKVLTRSDKARGKSDNVPSEEVVKKMKNYWRQLLNAKLITQRKFDNLTKAERGGLSELDKAGFIKRQLVETRQITKHVAQILDSRMNTKYDENDKLIREVKVITLKSKLVSDFRKDFQFYKVREINNYHHAHDAYLNAVVGTALIKKYPKLESEFVYGDYKVYDVRKMIAKSEQEIGKATAKYFFYSNIMNFFKTEITLANGEIRKRPLIETNGETGEIVWDKGRDFATVRKVLSMPQVNIVKKTEVQTGGFSKESILPKRNSDKLIARKKDWDPKKYGGFDSPTVAYSVLVVAKVEKGKSKKLKSVKELLGITIMERSSFEKNPIDFLEAKGYKEVKKDLIIKLPKYSLFELENGRKRMLASAGELQKGNELALPSKYVNFLYLASHYEKLKGSPEDNEQKQLFVEQHKHYLDEIIEQISEFSKRVILADANLDKVLSAYNKHRDKPIREQAENIIHLFTLTNLGAPAAFKYFDTTIDRKRYTSTKEVLDATLIHQSITGLYETRIDLSQLGGDGGEAAAKGSSPAPGGGRDIMKDIKVRLMTDSPDDSQDLMIGAIESNLFADQISWKSDQPVWLNQWPLKQEKLQALQQLVTEQLQLGHLEESNSPWNTPVFVIKKKSGKWRLLQDLRAVNATMHDMGALQPGLPSPVAPPKGWEIIIIDLQDCFFNIKLHPEDCKRFAFSVPSPNFKRPYQRFQWKVLPQGMKNSPTLCQKFVDKAILTVRDKYQDSYIVHYMDDILLAHPSRSIVDEILTSMIQALNKHGLVVSTEKIQKYDNLKYLGTHIQGDSVSYQKLQIRTDKLRTLNDFQKLLGNINWIRPFLKLTTGELKPLFEILNPDSNPISTRKLTPEACKALQLMNERLSTARVKRLDLSQPWSLCILKTEYTPTACLWQDGVVEWIHLPHISPKVITPYDIFCTQLIIKGRHRSKELFSKDPDYIVVPYTKVQFDLLLQEKEDWPISLLGFLGEVHFHLPKDPLLTFTLQTAIIFPHMTSTTPLEKGIVIFTDGSANGRSVTYIQGREPIIKENTQNTAQQAEIVAVITAFEEVSQPFNLYTDSKYVTGLFPEIETATLSPRTKIYTELKHLQRLIHKRQEKFYIGHIRGHTGLPGPLAQGNAYADSLTRILTAGKRTADGSEFEKRTADGSEFESPKKKAKVE

SEQ ID NO: 7609 - protein, 2176 aa, synthetic construct
MPAAKRVKLDGGDKKYSIGLDIGTNSVGWAVITDEYKVPSKKFKVLGNTDRHSIKKNLIGALLFDSGETAEATRLKRTARRRYTRRKNRICYLQEIFSNEMAKVDDSFFHRLEESFLVEEDKKHERHPIFGNIVDEVAYHEKYPTIYHLRKKLVDSTDKADLRLIYLALAHMIKFRGHFLIEGDLNPDNSDVDKLFIQLVQTYNQLFEENPINASGVDAKAILSARLSKSRRLENLIAQLPGEKKNGLFGNLIALSLGLTPNFKSNFDLAEDAKLQLSKDTYDDDLDNLLAQIGDQYADLFLAAKNLSDAILLSDILRVNTEITKAPLSASMIKRYDEHHQDLTLLKALVRQQLPEKYKEIFFDQSKNGYAGYIDGGASQEEFYKFIKPILEKMDGTEELLVKLNREDLLRKQRTFDNGSIPHQIHLGELHAILRRQEDFYPFLKDNREKIEKILTFRIPYYVGPLARGNSRFAWMTRKSEETITPWNFEEVVDKGASAQSFIERMTNFDKNLPNEKVLPKHSLLYEYFTVYNELTKVKYVTEGMRKPAFLSGEQKKAIVDLLFKTNRKVTVKQLKEDYFKKIECFDSVEISGVEDRFNASLGTYHDLLKIIKDKDFLDNEENEDILEDIVLTLTLFEDREMIEERLKTYAHLFDDKVMKQLKRRRYTGWGRLSRKLINGIRDKQSGKTILDFLKSDGFANRNFMQLIHDDSLTFKEDIQKAQVSGQGDSLHEHIANLAGSPAIKKGILQTVKVVDELVKVMGRHKPENIVIEMARENQTTQKGQKNSRERMKRIEEGIKELGSQILKEHPVENTQLQNEKLYLYYLQNGRDMYVDQELDINRLSDYDVDHIVPQSFLKDDSIDNKVLTRSDKARGKSDNVPSEEVVKKMKNYWRQLLNAKLITQRKFDNLTKAERGGLSELDKAGFIKRQLVETRQITKHVAQILDSRMNTKYDENDKLIREVKVITLKSKLVSDFRKDFQFYKVREINNYHHAHDAYLNAVVGTALIKKYPKLESEFVYGDYKVYDVRKMIAKSEQEIGKATAKYFFYSNIMNFFKTEITLANGEIRKRPLIETNGETGEIVWDKGRDFATVRKVLSMPQVNIVKKTEVQTGGFSKESILPKRNSDKLIARKKDWDPKKYGGFDSPTVAYSVLVVAKVEKGKSKKLKSVKELLGITIMERSSFEKNPIDFLEAKGYKEVKKDLIIKLPKYSLFELENGRKRMLASAGELQKGNELALPSKYVNFLYLASHYEKLKGSPEDNEQKQLFVEQHKHYLDEIIEQISEFSKRVILADANLDKVLSAYNKHRDKPIREQAENIIHLFTLTNLGAPAAFKYFDTTIDRKRYTSTKEVLDATLIHQSITGLYETRIDLSQLGGDGGEAAAKGSSPAPGGMDPLQLLQPLEAEIKGTKLKAHWNSGATITCVPEAFLEDERPIQTMLIKTIHGEKQQDVYYLTFKVQGRKVEAEVLASPYDYILLNPSDVPWLMKKPLQLTVLVPLHEYQERLLQQTALPKEQKELLQKLFLKYDALWQHWENQVGHRRIKPHNIATGTLAPRPQKQYPINPKAKPSIQIVIDDLLKQGVLIQQNSTMNTPVYPVPKPDGKWRMVLDYREVNKTIPLIAAQNQHSAGILSSIYRGKYKTTLDLTNGFWAHPITPESYWLTAFTWQGKQYCWTRLPQGFLNSPALFNADVVDLLKEIPNVQAYVDDIYISHDDPQEHLEQLEKIFSILLNAGYVVSLKKSEIAQREVEFLGFNITKEGRGLTDTFKQKLLNITPPKDLKQLQSILGKLNFARNFIPNYSELVKPLYTIVAPANGKFISWTEDNSNQLQHIISVLNQADNLEERNPETRLIIKVNSSPSAGYIRYYNEGSKRPIMYVNYIFSKAEAKFTQTEKLLTTMHKGLIKAMDLAMGQEILVYSPIVSMTKIQRTPLPERKALPVRWITWMTYLEDPRIQFHYDKSLPELQQIPNVTEDVIAKTKHPSEFAMVFYTDGSAIKHPDVNKSHSAGMGIAQVQFIPEYKIVHQWSIPLGDHTAQLAEIAAVEFACKKALKISGPVLIVTDSFYVAESANKELPYWKSNGFLNNKKKPLRHVSKWKSIAECLQLKPDIIIMHEKGHQQPMTTLHTEGNNLADKLATQGSYVVHAGKRTADGSEFEKRTADGSEFESPKKKAKVE

SEQ ID NO: 7610 - protein, 2087 aa, synthetic construct
MPAAKRVKLDGGDKKYSIGLDIGTNSVGWAVITDEYKVPSKKFKVLGNTDRHSIKKNLIGALLFDSGETAEATRLKRTARRRYTRRKNRICYLQEIFSNEMAKVDDSFFHRLEESFLVEEDKKHERHPIFGNIVDEVAYHEKYPTIYHLRKKLVDSTDKADLRLIYLALAHMIKFRGHFLIEGDLNPDNSDVDKLFIQLVQTYNQLFEENPINASGVDAKAILSARLSKSRRLENLIAQLPGEKKNGLFGNLIALSLGLTPNFKSNFDLAEDAKLQLSKDTYDDDLDNLLAQIGDQYADLFLAAKNLSDAILLSDILRVNTEITKAPLSASMIKRYDEHHQDLTLLKALVRQQLPEKYKEIFFDQSKNGYAGYIDGGASQEEFYKFIKPILEKMDGTEELLVKLNREDLLRKQRTFDNGSIPHQIHLGELHAILRRQEDFYPFLKDNREKIEKILTFRIPYYVGPLARGNSRFAWMTRKSEETITPWNFEEVVDKGASAQSFIERMTNFDKNLPNEKVLPKHSLLYEYFTVYNELTKVKYVTEGMRKPAFLSGEQKKAIVDLLFKTNRKVTVKQLKEDYFKKIECFDSVEISGVEDRFNASLGTYHDLLKIIKDKDFLDNEENEDILEDIVLTLTLFEDREMIEERLKTYAHLFDDKVMKQLKRRRYTGWGRLSRKLINGIRDKQSGKTILDFLKSDGFANRNFMQLIHDDSLTFKEDIQKAQVSGQGDSLHEHIANLAGSPAIKKGILQTVKVVDELVKVMGRHKPENIVIEMARENQTTQKGQKNSRERMKRIEEGIKELGSQILKEHPVENTQLQNEKLYLYYLQNGRDMYVDQELDINRLSDYDVDHIVPQSFLKDDSIDNKVLTRSDKARGKSDNVPSEEVVKKMKNYWRQLLNAKLITQRKFDNLTKAERGGLSELDKAGFIKRQLVETRQITKHVAQILDSRMNTKYDENDKLIREVKVITLKSKLVSDFRKDFQFYKVREINNYHHAHDAYLNAVVGTALIKKYPKLESEFVYGDYKVYDVRKMIAKSEQEIGKATAKYFFYSNIMNFFKTEITLANGEIRKRPLIETNGETGEIVWDKGRDFATVRKVLSMPQVNIVKKTEVQTGGFSKESILPKRNSDKLIARKKDWDPKKYGGFDSPTVAYSVLVVAKVEKGKSKKLKSVKELLGITIMERSSFEKNPIDFLEAKGYKEVKKDLIIKLPKYSLFELENGRKRMLASAGELQKGNELALPSKYVNFLYLASHYEKLKGSPEDNEQKQLFVEQHKHYLDEIIEQISEFSKRVILADANLDKVLSAYNKHRDKPIREQAENIIHLFTLTNLGAPAAFKYFDTTIDRKRYTSTKEVLDATLIHQSITGLYETRIDLSQLGGDGGEAAAKGSSPAPGGIPWLMKKPLQLTTLVPLQEYEERLLKQTMLTGSYKEKLQSLFLKYDALWQHWENQVGHRRIKPHHIATGTVNPRPQKQYPINPKAKASIQTVINDLLKQGVLIQQNSIMNTPVYPVPKPDGKWRMVLDYREVNKTIPLIAAQNQHSAGILSSIFRGKYKTTLDLSNGFWAHSITPESYWLTAFTWLGQQYCWTRLPQGFLNSPALFNADVVDLLKEVPNVQVYVDDIYISHDDPREHLEQLEKVFSLLLNAGYVVSLKKSEIAQHEVEFLGFNITKEGRGLTETFKQKLLNITPPRDLKQLQSILGKLNFARNFIPNFSELVKPLYNIIATAPGKYITWTTDNSQQLQNIISMLNSAENLEERNPEVRLIMKVNTSPSAGYIRFYNEFAKRPIMYLNYVYTKAEVKFTNTEKLLTTIHKGLIKALDLGMGQEILVYSPIVSMTKIQKTPLPERKALPIRWITWMSYLEDPRIQFHYDKTLPELQQVPTVTDDIIAKIKHPSEFSMVFYTDGSAIKHPNVNKSHNAGMGIAQVQFKPEFTVINTWSIPLGDHTAQLAEVAAVEFACKKALKIDGPVLIVTDSFYVAESVNKELPYWQSNGFFNNKKKPLKHVSKWKSIADCIQLKPDIIIIHEKGHQPTASTFHTEGNNLADKLATQGSYVVNAGKRTADGSEFEKRTADGSEFESPKKKAKVE

SEQ ID NO: 7611 - protein, 2176 aa, synthetic construct
MPAAKRVKLDGGDKKYSIGLDIGTNSVGWAVITDEYKVPSKKFKVLGNTDRHSIKKNLIGALLFDSGETAEATRLKRTARRRYTRRKNRICYLQEIFSNEMAKVDDSFFHRLEESFLVEEDKKHERHPIFGNIVDEVAYHEKYPTIYHLRKKLVDSTDKADLRLIYLALAHMIKFRGHFLIEGDLNPDNSDVDKLFIQLVQTYNQLFEENPINASGVDAKAILSARLSKSRRLENLIAQLPGEKKNGLFGNLIALSLGLTPNFKSNFDLAEDAKLQLSKDTYDDDLDNLLAQIGDQYADLFLAAKNLSDAILLSDILRVNTEITKAPLSASMIKRYDEHHQDLTLLKALVRQQLPEKYKEIFFDQSKNGYAGYIDGGASQEEFYKFIKPILEKMDGTEELLVKLNREDLLRKQRTFDNGSIPHQIHLGELHAILRRQEDFYPFLKDNREKIEKILTFRIPYYVGPLARGNSRFAWMTRKSEETITPWNFEEVVDKGASAQSFIERMTNFDKNLPNEKVLPKHSLLYEYFTVYNELTKVKYVTEGMRKPAFLSGEQKKAIVDLLFKTNRKVTVKQLKEDYFKKIECFDSVEISGVEDRFNASLGTYHDLLKIIKDKDFLDNEENEDILEDIVLTLTLFEDREMIEERLKTYAHLFDDKVMKQLKRRRYTGWGRLSRKLINGIRDKQSGKTILDFLKSDGFANRNFMQLIHDDSLTFKEDIQKAQVSGQGDSLHEHIANLAGSPAIKKGILQTVKVVDELVKVMGRHKPENIVIEMARENQTTQKGQKNSRERMKRIEEGIKELGSQILKEHPVENTQLQNEKLYLYYLQNGRDMYVDQELDINRLSDYDVDHIVPQSFLKDDSIDNKVLTRSDKARGKSDNVPSEEVVKKMKNYWRQLLNAKLITQRKFDNLTKAERGGLSELDKAGFIKRQLVETRQITKHVAQILDSRMNTKYDENDKLIREVKVITLKSKLVSDFRKDFQFYKVREINNYHHAHDAYLNAVVGTALIKKYPKLESEFVYGDYKVYDVRKMIAKSEQEIGKATAKYFFYSNIMNFFKTEITLANGEIRKRPLIETNGETGEIVWDKGRDFATVRKVLSMPQVNIVKKTEVQTGGFSKESILPKRNSDKLIARKKDWDPKKYGGFDSPTVAYSVLVVAKVEKGKSKKLKSVKELLGITIMERSSFEKNPIDFLEAKGYKEVKKDLIIKLPKYSLFELENGRKRMLASAGELQKGNELALPSKYVNFLYLASHYEKLKGSPEDNEQKQLFVEQHKHYLDEIIEQISEFSKRVILADANLDKVLSAYNKHRDKPIREQAENIIHLFTLTNLGAPAAFKYFDTTIDRKRYTSTKEVLDATLIHQSITGLYETRIDLSQLGGDGGEAAAKGSSPAPGGMDPLQLLQPLEAEIKGTKLKAHWNSGATITCVPQAFLEEEVPIKNIWIKTIHGEKEQPVYYLTFKIQGRKVEAEVISSPYDYILVSPSDIPWLMKKPLQLTTLVPLQEYEERLLKQTMLTGSYKEKLQSLFLKYDALWQHWENQVGHRRIKPHHIATGTVNPRPQKQYPINPKAKASIQTVINDLLKQGVLIQQNSIMNTPVYPVPKPDGKWRMVLDYREVNKTIPLIAAQNQHSAGILSSIFRGKYKTTLDLSNGFWAHSITPESYWLTAFTWLGQQYCWTRLPQGFLNSPALFNADVVDLLKEVPNVQVYVDDIYISHDDPREHLEQLEKVFSLLLNAGYVVSLKKSEIAQHEVEFLGFNITKEGRGLTETFKQKLLNITPPRDLKQLQSILGKLNFARNFIPNFSELVKPLYNIIATAPGKYITWTTDNSQQLQNIISMLNSAENLEERNPEVRLIMKVNTSPSAGYIRFYNEFAKRPIMYLNYVYTKAEVKFTNTEKLLTTIHKGLIKALDLGMGQEILVYSPIVSMTKIQKTPLPERKALPIRWITWMSYLEDPRIQFHYDKTLPELQQVPTVTDDIIAKIKHPSEFSMVFYTDGSAIKHPNVNKSHNAGMGIAQVQFKPEFTVINTWSIPLGDHTAQLAEVAAVEFACKKALKIDGPVLIVTDSFYVAESVNKELPYWQSNGFFNNKKKPLKHVSKWKSIADCIQLKPDIIIIHEKGHQPTASTFHTEGNNLADKLATQGSYVVNAGKRTADGSEFEKRTADGSEFESPKKKAKVE

SEQ ID NO: 7612 - protein, 2098 aa, synthetic construct
MPAAKRVKLDGGDKKYSIGLDIGTNSVGWAVITDEYKVPSKKFKVLGNTDRHSIKKNLIGALLFDSGETAEATRLKRTARRRYTRRKNRICYLQEIFSNEMAKVDDSFFHRLEESFLVEEDKKHERHPIFGNIVDEVAYHEKYPTIYHLRKKLVDSTDKADLRLIYLALAHMIKFRGHFLIEGDLNPDNSDVDKLFIQLVQTYNQLFEENPINASGVDAKAILSARLSKSRRLENLIAQLPGEKKNGLFGNLIALSLGLTPNFKSNFDLAEDAKLQLSKDTYDDDLDNLLAQIGDQYADLFLAAKNLSDAILLSDILRVNTEITKAPLSASMIKRYDEHHQDLTLLKALVRQQLPEKYKEIFFDQSKNGYAGYIDGGASQEEFYKFIKPILEKMDGTEELLVKLNREDLLRKQRTFDNGSIPHQIHLGELHAILRRQEDFYPFLKDNREKIEKILTFRIPYYVGPLARGNSRFAWMTRKSEETITPWNFEEVVDKGASAQSFIERMTNFDKNLPNEKVLPKHSLLYEYFTVYNELTKVKYVTEGMRKPAFLSGEQKKAIVDLLFKTNRKVTVKQLKEDYFKKIECFDSVEISGVEDRFNASLGTYHDLLKIIKDKDFLDNEENEDILEDIVLTLTLFEDREMIEERLKTYAHLFDDKVMKQLKRRRYTGWGRLSRKLINGIRDKQSGKTILDFLKSDGFANRNFMQLIHDDSLTFKEDIQKAQVSGQGDSLHEHIANLAGSPAIKKGILQTVKVVDELVKVMGRHKPENIVIEMARENQTTQKGQKNSRERMKRIEEGIKELGSQILKEHPVENTQLQNEKLYLYYLQNGRDMYVDQELDINRLSDYDVDHIVPQSFLKDDSIDNKVLTRSDKARGKSDNVPSEEVVKKMKNYWRQLLNAKLITQRKFDNLTKAERGGLSELDKAGFIKRQLVETRQITKHVAQILDSRMNTKYDENDKLIREVKVITLKSKLVSDFRKDFQFYKVREINNYHHAHDAYLNAVVGTALIKKYPKLESEFVYGDYKVYDVRKMIAKSEQEIGKATAKYFFYSNIMNFFKTEITLANGEIRKRPLIETNGETGEIVWDKGRDFATVRKVLSMPQVNIVKKTEVQTGGFSKESILPKRNSDKLIARKKDWDPKKYGGFDSPTVAYSVLVVAKVEKGKSKKLKSVKELLGITIMERSSFEKNPIDFLEAKGYKEVKKDLIIKLPKYSLFELENGRKRMLASAGELQKGNELALPSKYVNFLYLASHYEKLKGSPEDNEQKQLFVEQHKHYLDEIIEQISEFSKRVILADANLDKVLSAYNKHRDKPIREQAENIIHLFTLTNLGAPAAFKYFDTTIDRKRYTSTKEVLDATLIHQSITGLYETRIDLSQLGGDGGEAAAKPAPGSSGGTAPLEEEYRLFLEAPIQNVTLLEQWKREIPKVWAEINPPGLASTQAPIHVQLLSTALPVRVRQYPITLEAKRSLRETIRKFRAAGILRPVHSPWNTPLLPVRKSGTSEYRMVQDLREVNKRVETIHPTVPNPYTLLSLLPPDRIWYSVLDLKDAFFCIPLAPESQLIFAFEWADAEEGESGQLTWTRLPQGFKNSPTLFNEALNRDLQGFRLDHPSVSLLQYVDDLLIAADTQAACLSATRDLLMTLAELGYRVSGKKAQLCQEEVTYLGFKIHKGSRSLSNSRTQAILQIPVPKTKRQVREFLGKIGYCRLFIPGFAELAQPLYAATRPGNDPLVWGEKEEEAFQSLKLALTQPPALALPSLDKPFQLFVEETSGAAKGVLTQALGPWKRPVAYLSKRLDPVAAGWPRCLRAIAAAALLTREASKLTFGQDIEITSSHNLESLLRSPPDKWLTNARITQYQVLLLDPPRVRFKQTAALNPATLLPETDDTLPIHHCLDTLDSLTSTRPDLTDQPLAQAEATLFTDGSSYIRDGKRYAGAAVVTLDSVIWAEPLPIGTSAQKAELIALTKALEWSKDKSVNIYTDSRYAFATLHVHGMIYRERGWLTAGGKAIKNAPEILALLTAVWLPKRVAVMHCKGHQKDDAPTSTGNRRADEVAREVAIRPLSTQATISAGKRTADGSEFEKRTADGSEFESPKKKAKVE

SEQ ID NO: 7613 - protein, 2102 aa, synthetic construct
MPAAKRVKLDGGDKKYSIGLDIGTNSVGWAVITDEYKVPSKKFKVLGNTDRHSIKKNLIGALLFDSGETAEATRLKRTARRRYTRRKNRICYLQEIFSNEMAKVDDSFFHRLEESFLVEEDKKHERHPIFGNIVDEVAYHEKYPTIYHLRKKLVDSTDKADLRLIYLALAHMIKFRGHFLIEGDLNPDNSDVDKLFIQLVQTYNQLFEENPINASGVDAKAILSARLSKSRRLENLIAQLPGEKKNGLFGNLIALSLGLTPNFKSNFDLAEDAKLQLSKDTYDDDLDNLLAQIGDQYADLFLAAKNLSDAILLSDILRVNTEITKAPLSASMIKRYDEHHQDLTLLKALVRQQLPEKYKEIFFDQSKNGYAGYIDGGASQEEFYKFIKPILEKMDGTEELLVKLNREDLLRKQRTFDNGSIPHQIHLGELHAILRRQEDFYPFLKDNREKIEKILTFRIPYYVGPLARGNSRFAWMTRKSEETITPWNFEEVVDKGASAQSFIERMTNFDKNLPNEKVLPKHSLLYEYFTVYNELTKVKYVTEGMRKPAFLSGEQKKAIVDLLFKTNRKVTVKQLKEDYFKKIECFDSVEISGVEDRFNASLGTYHDLLKIIKDKDFLDNEENEDILEDIVLTLTLFEDREMIEERLKTYAHLFDDKVMKQLKRRRYTGWGRLSRKLINGIRDKQSGKTILDFLKSDGFANRNFMQLIHDDSLTFKEDIQKAQVSGQGDSLHEHIANLAGSPAIKKGILQTVKVVDELVKVMGRHKPENIVIEMARENQTTQKGQKNSRERMKRIEEGIKELGSQILKEHPVENTQLQNEKLYLYYLQNGRDMYVDQELDINRLSDYDVDHIVPQSFLKDDSIDNKVLTRSDKARGKSDNVPSEEVVKKMKNYWRQLLNAKLITQRKFDNLTKAERGGLSELDKAGFIKRQLVETRQITKHVAQILDSRMNTKYDENDKLIREVKVITLKSKLVSDFRKDFQFYKVREINNYHHAHDAYLNAVVGTALIKKYPKLESEFVYGDYKVYDVRKMIAKSEQEIGKATAKYFFYSNIMNFFKTEITLANGEIRKRPLIETNGETGEIVWDKGRDFATVRKVLSMPQVNIVKKTEVQTGGFSKESILPKRNSDKLIARKKDWDPKKYGGFDSPTVAYSVLVVAKVEKGKSKKLKSVKELLGITIMERSSFEKNPIDFLEAKGYKEVKKDLIIKLPKYSLFELENGRKRMLASAGELQKGNELALPSKYVNFLYLASHYEKLKGSPEDNEQKQLFVEQHKHYLDEIIEQISEFSKRVILADANLDKVLSAYNKHRDKPIREQAENIIHLFTLTNLGAPAAFKYFDTTIDRKRYTSTKEVLDATLIHQSITGLYETRIDLSQLGGDGGEAAAKPAPGSSGGTVSLQDEHRLFDIPVTTSLPDVWLQDFPQAWAETGGLGRAKCQAPIIIDLKPTAVPVSIKQYPMSLEAHMGIRQHIIKFLELGVLRPCRSPWNTPLLPVKKPGTQDYRPVQDLREINKRTVDIHPTVPNPYNLLSTLKPDYSWYTVLDLKDAFFCLPLAPQSQELFAFEWKDPERGISGQLTWTRLPQGFKNSPTLFNEALHRDLTDFRTQHPEVTLLQYVDDLLLAAPTKKACTQGTRHLLQELGEKGYRASAKKAQICQTKVTYLGYILSEGKRWLTPGRIETVARIPPPRNPREVREFLGTAGFCRLWIPGFAELAAPLYALTKPSTPFTWQTEHQLAFEALKKALLSAPALGLPDTSKPFTLFLDERQGIAKGVLTQKLGPWKRPVAYLSKKLDPVAAGWPPCLRIMAATAMLVKDSAKLTLGQPLTVITPHTLEAIVRQPPDRWITNARLTHYQALLLDTDRVQFGPPVTLNPATLLPVPENQPSPHDCRQVLAETHGTREDLKDQELPDADHTWYTDGSSYLDSGTRRAGAAVVDGHNTIWAQSLPPGTSAQKAELIALTKALELSKGKKANIYTDSRYAFATAHTHGSIYERRGWLTSEGKEIKNKAEIIALLKALFLPQEVAIIHCPGHQKGQDPVAVGNRQADRVARQAAMAEVLTLATEPDNTSHITAGKRTADGSEFEKRTADGSEFESPKKKAKVE

SEQ ID NO: 7614 - protein, 2173 aa, synthetic construct
MPAAKRVKLDGGDKKYSIGLDIGTNSVGWAVITDEYKVPSKKFKVLGNTDRHSIKKNLIGALLFDSGETAEATRLKRTARRRYTRRKNRICYLQEIFSNEMAKVDDSFFHRLEESFLVEEDKKHERHPIFGNIVDEVAYHEKYPTIYHLRKKLVDSTDKADLRLIYLALAHMIKFRGHFLIEGDLNPDNSDVDKLFIQLVQTYNQLFEENPINASGVDAKAILSARLSKSRRLENLIAQLPGEKKNGLFGNLIALSLGLTPNFKSNFDLAEDAKLQLSKDTYDDDLDNLLAQIGDQYADLFLAAKNLSDAILLSDILRVNTEITKAPLSASMIKRYDEHHQDLTLLKALVRQQLPEKYKEIFFDQSKNGYAGYIDGGASQEEFYKFIKPILEKMDGTEELLVKLNREDLLRKQRTFDNGSIPHQIHLGELHAILRRQEDFYPFLKDNREKIEKILTFRIPYYVGPLARGNSRFAWMTRKSEETITPWNFEEVVDKGASAQSFIERMTNFDKNLPNEKVLPKHSLLYEYFTVYNELTKVKYVTEGMRKPAFLSGEQKKAIVDLLFKTNRKVTVKQLKEDYFKKIECFDSVEISGVEDRFNASLGTYHDLLKIIKDKDFLDNEENEDILEDIVLTLTLFEDREMIEERLKTYAHLFDDKVMKQLKRRRYTGWGRLSRKLINGIRDKQSGKTILDFLKSDGFANRNFMQLIHDDSLTFKEDIQKAQVSGQGDSLHEHIANLAGSPAIKKGILQTVKVVDELVKVMGRHKPENIVIEMARENQTTQKGQKNSRERMKRIEEGIKELGSQILKEHPVENTQLQNEKLYLYYLQNGRDMYVDQELDINRLSDYDVDHIVPQSFLKDDSIDNKVLTRSDKARGKSDNVPSEEVVKKMKNYWRQLLNAKLITQRKFDNLTKAERGGLSELDKAGFIKRQLVETRQITKHVAQILDSRMNTKYDENDKLIREVKVITLKSKLVSDFRKDFQFYKVREINNYHHAHDAYLNAVVGTALIKKYPKLESEFVYGDYKVYDVRKMIAKSEQEIGKATAKYFFYSNIMNFFKTEITLANGEIRKRPLIETNGETGEIVWDKGRDFATVRKVLSMPQVNIVKKTEVQTGGFSKESILPKRNSDKLIARKKDWDPKKYGGFDSPTVAYSVLVVAKVEKGKSKKLKSVKELLGITIMERSSFEKNPIDFLEAKGYKEVKKDLIIKLPKYSLFELENGRKRMLASAGELQKGNELALPSKYVNFLYLASHYEKLKGSPEDNEQKQLFVEQHKHYLDEIIEQISEFSKRVILADANLDKVLSAYNKHRDKPIREQAENIIHLFTLTNLGAPAAFKYFDTTIDRKRYTSTKEVLDATLIHQSITGLYETRIDLSQLGGDGGEAAAKPAPGSSGGMDLLKPLTVERKGVKIKGYWNSQADITCVPKDLLQGEEPVRQQNVTTIHGTQEGDVYYVNLKIDGRRINTEVIGTTLDYAIITPGDVPWILKKPLELTIKLDLEEQQGTLLNNSILSKKGKEELKQLFEKYSALWQSWENQVGHRRIRPHKIATGTVKPTPQKQYHINPKAKPDIQIVINDLLKQGVLIQKESTMNTPVYPVPKPNGRWRMVLDYRAVNKVTPLIAVQNQHSYGILGSLFKGRYKTTIDLSNGFWAHPIVPEDYWITAFTWQGKQYCWTVLPQGFLNSPGLFTGDVVDLLQGIPNVEVYVDDVYISHDSEKEHLEYLDILFNRLKEAGYIISLKKSNIANSIVDFLGFQITNEGRGLTDTFKEKLENITAPTTLKQLQSILGLLNFARNFIPDFTELIAPLYALIPKSTKNYVPWQIEHSTTLETLITKLNGAEYLQGRKGDKTLIMKVNASYTTGYIRYYNEGEKKPISYVSIVFSKTELKFTELEKLLTTVHKGLLKALDLSMGQNIHVYSPIVSMQNIQKTPQTAKKALASRWLSWLSYLEDPRIRFFYDPQMPALKDLPAVDTGKDNKKHPSNFQHIFYTDGSAITSPTKEGHLNAGMGIVYFINKDGNLQKQQEWSISLGNHTAQFAEIAAFEFALKKCLPLGGNILVVTDSNYVAKAYNEELDVWASNGFVNNRKKPLKHISKWKSVADLKRLRPDVVVTHEPGHQKLDSSPHAYGNNLADQLATQASFKVHAGKRTADGSEFEKRTADGSEFESPKKKAKVE

SEQ ID NO: 7615 - protein, 2095 aa, synthetic construct
MPAAKRVKLDGGDKKYSIGLDIGTNSVGWAVITDEYKVPSKKFKVLGNTDRHSIKKNLIGALLFDSGETAEATRLKRTARRRYTRRKNRICYLQEIFSNEMAKVDDSFFHRLEESFLVEEDKKHERHPIFGNIVDEVAYHEKYPTIYHLRKKLVDSTDKADLRLIYLALAHMIKFRGHFLIEGDLNPDNSDVDKLFIQLVQTYNQLFEENPINASGVDAKAILSARLSKSRRLENLIAQLPGEKKNGLFGNLIALSLGLTPNFKSNFDLAEDAKLQLSKDTYDDDLDNLLAQIGDQYADLFLAAKNLSDAILLSDILRVNTEITKAPLSASMIKRYDEHHQDLTLLKALVRQQLPEKYKEIFFDQSKNGYAGYIDGGASQEEFYKFIKPILEKMDGTEELLVKLNREDLLRKQRTFDNGSIPHQIHLGELHAILRRQEDFYPFLKDNREKIEKILTFRIPYYVGPLARGNSRFAWMTRKSEETITPWNFEEVVDKGASAQSFIERMTNFDKNLPNEKVLPKHSLLYEYFTVYNELTKVKYVTEGMRKPAFLSGEQKKAIVDLLFKTNRKVTVKQLKEDYFKKIECFDSVEISGVEDRFNASLGTYHDLLKIIKDKDFLDNEENEDILEDIVLTLTLFEDREMIEERLKTYAHLFDDKVMKQLKRRRYTGWGRLSRKLINGIRDKQSGKTILDFLKSDGFANRNFMQLIHDDSLTFKEDIQKAQVSGQGDSLHEHIANLAGSPAIKKGILQTVKVVDELVKVMGRHKPENIVIEMARENQTTQKGQKNSRERMKRIEEGIKELGSQILKEHPVENTQLQNEKLYLYYLQNGRDMYVDQELDINRLSDYDVDHIVPQSFLKDDSIDNKVLTRSDKARGKSDNVPSEEVVKKMKNYWRQLLNAKLITQRKFDNLTKAERGGLSELDKAGFIKRQLVETRQITKHVAQILDSRMNTKYDENDKLIREVKVITLKSKLVSDFRKDFQFYKVREINNYHHAHDAYLNAVVGTALIKKYPKLESEFVYGDYKVYDVRKMIAKSEQEIGKATAKYFFYSNIMNFFKTEITLANGEIRKRPLIETNGETGEIVWDKGRDFATVRKVLSMPQVNIVKKTEVQTGGFSKESILPKRNSDKLIARKKDWDPKKYGGFDSPTVAYSVLVVAKVEKGKSKKLKSVKELLGITIMERSSFEKNPIDFLEAKGYKEVKKDLIIKLPKYSLFELENGRKRMLASAGELQKGNELALPSKYVNFLYLASHYEKLKGSPEDNEQKQLFVEQHKHYLDEIIEQISEFSKRVILADANLDKVLSAYNKHRDKPIREQAENIIHLFTLTNLGAPAAFKYFDTTIDRKRYTSTKEVLDATLIHQSITGLYETRIDLSQLGGDGGEAAAKPAPGSSGGTLQLEEEYRLFEPESTQKQEMDIWLKNFPQAWAETGGMGTAHCQAPVLIQLKATATPISIRQYPMPHEAYQGIKPHIRRMLDQGILKPCQSPWNTPLLPVKKPGTEDYRPVQDLREVNKRVEDIHPTVPNPYNLLSTLPPSHPWYTVLDLKDAFFCLRLHSESQLLFAFEWRDPEIGLSGQLTWTRLPQGFKNSPTLFNEALHSDLADFRVRYPALVLLQYVDDLLLAAATRTECLEGTKALLETLGNKGYRASAKKAQICLQEVTYLGYSLKDGQRWLTKARKEAILSIPVPKNSRQVREFLGKAGYCRLFIPGFAELAAPLYPLTRPGTLFQWGTEQQLAFEDIKKALLSSPALGLPDITKPFELFIDENSGFAKGVLVQKLGPWKRPVAYLSKKLDTVASGWPPCLRMVAAIAILVKDAGKLTLGQPLTILTSHPVEALVRQPPNKWLSNARMTHYQAMLLDAERVHFGPTVSLNPATLLPLPSGGNHHDCLQILAETHGTRPDLTDQPLPDADLTWYTDGSSFIRNGEREAGAAVTTESEVIWAAPLPPGTSAQRAELIALTQALKMAEGKKLTVYTDSRYAFATTHVHGEIYRRRGWLTSEGKEIKNKNEILALLEALFLPKRLSIIHCPGHQKGDSPQAKGNRLADDTAKKAATETHSSLTVLPAGKRTADGSEFEKRTADGSEFESPKKKAKVE

SEQ ID NO: 7616 - protein, 2087 aa, synthetic construct
MPAAKRVKLDGGDKKYSIGLDIGTNSVGWAVITDEYKVPSKKFKVLGNTDRHSIKKNLIGALLFDSGETAEATRLKRTARRRYTRRKNRICYLQEIFSNEMAKVDDSFFHRLEESFLVEEDKKHERHPIFGNIVDEVAYHEKYPTIYHLRKKLVDSTDKADLRLIYLALAHMIKFRGHFLIEGDLNPDNSDVDKLFIQLVQTYNQLFEENPINASGVDAKAILSARLSKSRRLENLIAQLPGEKKNGLFGNLIALSLGLTPNFKSNFDLAEDAKLQLSKDTYDDDLDNLLAQIGDQYADLFLAAKNLSDAILLSDILRVNTEITKAPLSASMIKRYDEHHQDLTLLKALVRQQLPEKYKEIFFDQSKNGYAGYIDGGASQEEFYKFIKPILEKMDGTEELLVKLNREDLLRKQRTFDNGSIPHQIHLGELHAILRRQEDFYPFLKDNREKIEKILTFRIPYYVGPLARGNSRFAWMTRKSEETITPWNFEEVVDKGASAQSFIERMTNFDKNLPNEKVLPKHSLLYEYFTVYNELTKVKYVTEGMRKPAFLSGEQKKAIVDLLFKTNRKVTVKQLKEDYFKKIECFDSVEISGVEDRFNASLGTYHDLLKIIKDKDFLDNEENEDILEDIVLTLTLFEDREMIEERLKTYAHLFDDKVMKQLKRRRYTGWGRLSRKLINGIRDKQSGKTILDFLKSDGFANRNFMQLIHDDSLTFKEDIQKAQVSGQGDSLHEHIANLAGSPAIKKGILQTVKVVDELVKVMGRHKPENIVIEMARENQTTQKGQKNSRERMKRIEEGIKELGSQILKEHPVENTQLQNEKLYLYYLQNGRDMYVDQELDINRLSDYDVDHIVPQSFLKDDSIDNKVLTRSDKARGKSDNVPSEEVVKKMKNYWRQLLNAKLITQRKFDNLTKAERGGLSELDKAGFIKRQLVETRQITKHVAQILDSRMNTKYDENDKLIREVKVITLKSKLVSDFRKDFQFYKVREINNYHHAHDAYLNAVVGTALIKKYPKLESEFVYGDYKVYDVRKMIAKSEQEIGKATAKYFFYSNIMNFFKTEITLANGEIRKRPLIETNGETGEIVWDKGRDFATVRKVLSMPQVNIVKKTEVQTGGFSKESILPKRNSDKLIARKKDWDPKKYGGFDSPTVAYSVLVVAKVEKGKSKKLKSVKELLGITIMERSSFEKNPIDFLEAKGYKEVKKDLIIKLPKYSLFELENGRKRMLASAGELQKGNELALPSKYVNFLYLASHYEKLKGSPEDNEQKQLFVEQHKHYLDEIIEQISEFSKRVILADANLDKVLSAYNKHRDKPIREQAENIIHLFTLTNLGAPAAFKYFDTTIDRKRYTSTKEVLDATLIHQSITGLYETRIDLSQLGGDGGEAAAKPAPGSSGGVPWLTQQPLQLTILVPLQEYQEKILSKTALPEDQKQQLKTLFVKYDNLWQHWENQVGHRKIRPHNIATGDYPPRPQKQYPINPKAKPSIQIVIDDLLKQGVLTPQNSTMNTPVYPVPKPDGRWRMVLDYREVNKTIPLTAAQNQHSAGILATIVRQKYKTTLDLANGFWAHPITPESYWLTAFTWQGKQYCWTRLPQGFLNSPALFNADVVDLLKEIPNVQVYVDDIYLSHDDPKEHVQQLEKVFQILLQAGYVVSLKKSEIGQKTVEFLGFNITKEGRGLTDTFKTKLLNITPPKDLKQLQSILGKLNFARNFIPNFAELVQPLYNLIAPAKGKYIEWSEENTKQLNMVIEALNTASNLEERLPEQRLVIKVNTSPSAGYVRYYNETGKKPIMYLNYVFSKAELKFSMLEKLLTTMHKALIKAMDLAMGQEILVYSPIVSMTKIQKTPLPERKALPIRWITWMTYLEDPRIQFHYDKTLPELKHIPDVYTSSQSPVKHPSQYEGVFYTDGSAIKSPDPTKSNNAGMGIVHATYKPEYQVLNQWSIPLGNHTAQMAEIAAVEFACKKALKIPGPVLVITDSFYVAESANKELPYWKSNGFVNNKKKPLKHISKWKSIAECLSMKPDITIQHEKGISLQIPVFILKGNALADKLATQGSYVVNAGKRTADGSEFEKRTADGSEFESPKKKAKVE

SEQ ID NO: 7617 - protein, 2094 aa, synthetic construct
MPAAKRVKLDGGDKKYSIGLDIGTNSVGWAVITDEYKVPSKKFKVLGNTDRHSIKKNLIGALLFDSGETAEATRLKRTARRRYTRRKNRICYLQEIFSNEMAKVDDSFFHRLEESFLVEEDKKHERHPIFGNIVDEVAYHEKYPTIYHLRKKLVDSTDKADLRLIYLALAHMIKFRGHFLIEGDLNPDNSDVDKLFIQLVQTYNQLFEENPINASGVDAKAILSARLSKSRRLENLIAQLPGEKKNGLFGNLIALSLGLTPNFKSNFDLAEDAKLQLSKDTYDDDLDNLLAQIGDQYADLFLAAKNLSDAILLSDILRVNTEITKAPLSASMIKRYDEHHQDLTLLKALVRQQLPEKYKEIFFDQSKNGYAGYIDGGASQEEFYKFIKPILEKMDGTEELLVKLNREDLLRKQRTFDNGSIPHQIHLGELHAILRRQEDFYPFLKDNREKIEKILTFRIPYYVGPLARGNSRFAWMTRKSEETITPWNFEEVVDKGASAQSFIERMTNFDKNLPNEKVLPKHSLLYEYFTVYNELTKVKYVTEGMRKPAFLSGEQKKAIVDLLFKTNRKVTVKQLKEDYFKKIECFDSVEISGVEDRFNASLGTYHDLLKIIKDKDFLDNEENEDILEDIVLTLTLFEDREMIEERLKTYAHLFDDKVMKQLKRRRYTGWGRLSRKLINGIRDKQSGKTILDFLKSDGFANRNFMQLIHDDSLTFKEDIQKAQVSGQGDSLHEHIANLAGSPAIKKGILQTVKVVDELVKVMGRHKPENIVIEMARENQTTQKGQKNSRERMKRIEEGIKELGSQILKEHPVENTQLQNEKLYLYYLQNGRDMYVDQELDINRLSDYDVDHIVPQSFLKDDSIDNKVLTRSDKARGKSDNVPSEEVVKKMKNYWRQLLNAKLITQRKFDNLTKAERGGLSELDKAGFIKRQLVETRQITKHVAQILDSRMNTKYDENDKLIREVKVITLKSKLVSDFRKDFQFYKVREINNYHHAHDAYLNAVVGTALIKKYPKLESEFVYGDYKVYDVRKMIAKSEQEIGKATAKYFFYSNIMNFFKTEITLANGEIRKRPLIETNGETGEIVWDKGRDFATVRKVLSMPQVNIVKKTEVQTGGFSKESILPKRNSDKLIARKKDWDPKKYGGFDSPTVAYSVLVVAKVEKGKSKKLKSVKELLGITIMERSSFEKNPIDFLEAKGYKEVKKDLIIKLPKYSLFELENGRKRMLASAGELQKGNELALPSKYVNFLYLASHYEKLKGSPEDNEQKQLFVEQHKHYLDEIIEQISEFSKRVILADANLDKVLSAYNKHRDKPIREQAENIIHLFTLTNLGAPAAFKYFDTTIDRKRYTSTKEVLDATLIHQSITGLYETRIDLSQLGGDGGEAAAKPAPGSSGGVLNLEEEYRLHEKPVPSSIDPSWLQLFPTVWAERAGMGLANQVPPVVVELRSGASPVAVRQYPMSKEAREGIRPHIQKFLDLGVLVPCRSPWNTPLLPVKKPGTNDYRPVQDLREINKRVQDIHPTVPNPYNLLSSLPPSYTWYSVLDLKDAFFCLRLHPNSQPLFAFEWKDPEKGNTGQLTWTRLPQGFKNSPTLFNEALHRDLAPFRALNPQVVLLQYVDDLLVAAPTYEDCKKGTQKLLQELSKLGYRVSAKKAQLCQREVTYLGYLLKEGKRWLTPARKATVMKIPVPTTPRQVREFLGTAGFCRLWIPGFASLAAPLYPLTKPSIPFIWTEEHQQAFDHIKKALLSAPALALPDLTKPFTLYIDERAGVARGVLTQTLGPWRRPVAYLSKKLDPVASGWPTCLKAVAAVALLLKDADKLTLGQNVTVIASHSLESIVRQPPDRWMTNARMTHYQSLLLNERVSFAPPAVLNPATLLPVESEATPVHRCSEILAEETGTRRDLEDQPLPGVPTWYTDGSSFITEGKRRAGAPIVDGKRTVWASSLPEGTSAQKAELVALTQALRLAEGKNINIYTDSRYAFATAHIHGAIYKQRGWLTSAGKDIKNKEEILALLEAIHLPRRVAIIHCPGHQRGSNPVATGNRRADEAAKQAALSTRVLAGTTKPAGKRTADGSEFEKRTADGSEFESPKKKAKVE

SEQ ID NO: 7618 - protein, 2094 aa, synthetic construct
MPAAKRVKLDGGDKKYSIGLDIGTNSVGWAVITDEYKVPSKKFKVLGNTDRHSIKKNLIGALLFDSGETAEATRLKRTARRRYTRRKNRICYLQEIFSNEMAKVDDSFFHRLEESFLVEEDKKHERHPIFGNIVDEVAYHEKYPTIYHLRKKLVDSTDKADLRLIYLALAHMIKFRGHFLIEGDLNPDNSDVDKLFIQLVQTYNQLFEENPINASGVDAKAILSARLSKSRRLENLIAQLPGEKKNGLFGNLIALSLGLTPNFKSNFDLAEDAKLQLSKDTYDDDLDNLLAQIGDQYADLFLAAKNLSDAILLSDILRVNTEITKAPLSASMIKRYDEHHQDLTLLKALVRQQLPEKYKEIFFDQSKNGYAGYIDGGASQEEFYKFIKPILEKMDGTEELLVKLNREDLLRKQRTFDNGSIPHQIHLGELHAILRRQEDFYPFLKDNREKIEKILTFRIPYYVGPLARGNSRFAWMTRKSEETITPWNFEEVVDKGASAQSFIERMTNFDKNLPNEKVLPKHSLLYEYFTVYNELTKVKYVTEGMRKPAFLSGEQKKAIVDLLFKTNRKVTVKQLKEDYFKKIECFDSVEISGVEDRFNASLGTYHDLLKIIKDKDFLDNEENEDILEDIVLTLTLFEDREMIEERLKTYAHLFDDKVMKQLKRRRYTGWGRLSRKLINGIRDKQSGKTILDFLKSDGFANRNFMQLIHDDSLTFKEDIQKAQVSGQGDSLHEHIANLAGSPAIKKGILQTVKVVDELVKVMGRHKPENIVIEMARENQTTQKGQKNSRERMKRIEEGIKELGSQILKEHPVENTQLQNEKLYLYYLQNGRDMYVDQELDINRLSDYDVDHIVPQSFLKDDSIDNKVLTRSDKARGKSDNVPSEEVVKKMKNYWRQLLNAKLITQRKFDNLTKAERGGLSELDKAGFIKRQLVETRQITKHVAQILDSRMNTKYDENDKLIREVKVITLKSKLVSDFRKDFQFYKVREINNYHHAHDAYLNAVVGTALIKKYPKLESEFVYGDYKVYDVRKMIAKSEQEIGKATAKYFFYSNIMNFFKTEITLANGEIRKRPLIETNGETGEIVWDKGRDFATVRKVLSMPQVNIVKKTEVQTGGFSKESILPKRNSDKLIARKKDWDPKKYGGFDSPTVAYSVLVVAKVEKGKSKKLKSVKELLGITIMERSSFEKNPIDFLEAKGYKEVKKDLIIKLPKYSLFELENGRKRMLASAGELQKGNELALPSKYVNFLYLASHYEKLKGSPEDNEQKQLFVEQHKHYLDEIIEQISEFSKRVILADANLDKVLSAYNKHRDKPIREQAENIIHLFTLTNLGAPAAFKYFDTTIDRKRYTSTKEVLDATLIHQSITGLYETRIDLSQLGGDGGEAAAKPAPGSSGGVLNLEEEYRLHEKPVPSSIDPSWLQLFPTVWAERAGMGLANQVPPVVVELRSGASPVAVRQYPMSKEAREGIRPHIQKFLDLGVLVPCRSPWNTPLLPVKKPGTNDYRPVQDLREINKRVQDIHPTVPNPYNLLSSLPPSYTWYSVLDLKDAFFCLRLHPNSQPLFAFEWKDPEKGNTGQLTWTRLPQGFKNSPTLFNEALHRDLAPFRALNPQVVLLQYVDDLLVAAPTYEDCKKGTQKLLQELSKLGYRVSAKKAQLCQREVTYLGYLLKEGKRWLTPARKATVMKIPVPTTPRQVREFLGKAGFCRLFIPGFASLAAPLYPLTKPSIPFIWTEEHQQAFDHIKKALLSAPALALPDLTKPFTLYIDERAGVARGVLTQTLGPWRRPVAYLSKKLDPVASGWPTCLKAVAAVALLLKDADKLTLGQNVTVIASHSLESIVRQPPDRWMTNARMTHYQSLLLNERVSFAPPAVLNPATLLPVESEATPVHRCSEILAEETGTRRDLEDQPLPGVPTWYTDGSSFITEGKRRAGAPIVDGKRTVWASSLPEGTSAQKAELVALTQALRLAEGKNINIYTDSRYAFATAHIHGAIYKQRGWLTSAGKDIKNKEEILALLEAIHLPRRVAIIHCPGHQRGSNPVATGNRRADEAAKQAALSTRVLAGTTKPAGKRTADGSEFEKRTADGSEFESPKKKAKVE

SEQ ID NO: 7619 - protein, 2218 aa, synthetic construct
MPAAKRVKLDGGDKKYSIGLDIGTNSVGWAVITDEYKVPSKKFKVLGNTDRHSIKKNLIGALLFDSGETAEATRLKRTARRRYTRRKNRICYLQEIFSNEMAKVDDSFFHRLEESFLVEEDKKHERHPIFGNIVDEVAYHEKYPTIYHLRKKLVDSTDKADLRLIYLALAHMIKFRGHFLIEGDLNPDNSDVDKLFIQLVQTYNQLFEENPINASGVDAKAILSARLSKSRRLENLIAQLPGEKKNGLFGNLIALSLGLTPNFKSNFDLAEDAKLQLSKDTYDDDLDNLLAQIGDQYADLFLAAKNLSDAILLSDILRVNTEITKAPLSASMIKRYDEHHQDLTLLKALVRQQLPEKYKEIFFDQSKNGYAGYIDGGASQEEFYKFIKPILEKMDGTEELLVKLNREDLLRKQRTFDNGSIPHQIHLGELHAILRRQEDFYPFLKDNREKIEKILTFRIPYYVGPLARGNSRFAWMTRKSEETITPWNFEEVVDKGASAQSFIERMTNFDKNLPNEKVLPKHSLLYEYFTVYNELTKVKYVTEGMRKPAFLSGEQKKAIVDLLFKTNRKVTVKQLKEDYFKKIECFDSVEISGVEDRFNASLGTYHDLLKIIKDKDFLDNEENEDILEDIVLTLTLFEDREMIEERLKTYAHLFDDKVMKQLKRRRYTGWGRLSRKLINGIRDKQSGKTILDFLKSDGFANRNFMQLIHDDSLTFKEDIQKAQVSGQGDSLHEHIANLAGSPAIKKGILQTVKVVDELVKVMGRHKPENIVIEMARENQTTQKGQKNSRERMKRIEEGIKELGSQILKEHPVENTQLQNEKLYLYYLQNGRDMYVDQELDINRLSDYDVDHIVPQSFLKDDSIDNKVLTRSDKARGKSDNVPSEEVVKKMKNYWRQLLNAKLITQRKFDNLTKAERGGLSELDKAGFIKRQLVETRQITKHVAQILDSRMNTKYDENDKLIREVKVITLKSKLVSDFRKDFQFYKVREINNYHHAHDAYLNAVVGTALIKKYPKLESEFVYGDYKVYDVRKMIAKSEQEIGKATAKYFFYSNIMNFFKTEITLANGEIRKRPLIETNGETGEIVWDKGRDFATVRKVLSMPQVNIVKKTEVQTGGFSKESILPKRNSDKLIARKKDWDPKKYGGFDSPTVAYSVLVVAKVEKGKSKKLKSVKELLGITIMERSSFEKNPIDFLEAKGYKEVKKDLIIKLPKYSLFELENGRKRMLASAGELQKGNELALPSKYVNFLYLASHYEKLKGSPEDNEQKQLFVEQHKHYLDEIIEQISEFSKRVILADANLDKVLSAYNKHRDKPIREQAENIIHLFTLTNLGAPAAFKYFDTTIDRKRYTSTKEVLDATLIHQSITGLYETRIDLSQLGGDGGEAAAKPAPGSSGGTLGDQGSRGSDPLPEPRVTLTVEGIPTEFLVNTGAEHSVLTKPMGKMGSKRTVVAGATGSKVYPWTTKRLLKIGQKQVTHSFLVIPECPAPLLGRDLLTKLKAQIQFSTEGPQVTWEDRPAMCLVLNLEEEYRLHEKPVPPSIDPSWLQLFPMVWAEKAGMGLANQVPPVVVELKSDASPVAVRQYPMSKEAREGIRPHIQRFLDLGILVPCQSPWNTPLLPVKKPGTNDYRPVQDLREVNKRVQDIHPTVPNPYNLLSSLPPSHTWYSVLDLKDAFFCLKLHPNSQPLFAFEWRDPEKGNTGQLTWTRLPQGFKNSPTLFDEALHRDLASFRALNPQVVMLQYVDDLLVAAPTYRDCKEGTRRLLQELSKLGYRVSAKKAQLCREEVTYLGYLLKGGKRWLTPARKATVMKIPTPTTPRQVREFLGTAGFCRLWIPGFASLAAPLYPLTREKVPFTWTEAHQEAFGRIKEALLSAPALALPDLTKPFALYVDEKEGVARGVLTQTLGPWRRPVAYLSKKLDPVASGWPTCLKAIAAVALLLKDADKLTLGQNVLVIAPHNLESIVRQPPDRWMTNARMTHYQSLLLNERVSFAPPAILNPATLLPVESDDTPIHICSEILAEETGTRPDLRDQPLPGVPAWYTDGSSFIMDGRRQAGAAIVDNKRTVWASNLPEGTSAQKAELIALTQALRLAEGKSINIYTDSRYAFATAHVHGAIYKQRGLLTSAGKDIKNKEEILALLEAIHLPKRVAIIHCPGHQRGTDPVATGNRKADEAAKQAAQSTRILTETTKNAGKRTADGSEFEKRTADGSEFESPKKKAKVE

SEQ ID NO: 7620 - protein, 2218 aa, synthetic construct
MPAAKRVKLDGGDKKYSIGLDIGTNSVGWAVITDEYKVPSKKFKVLGNTDRHSIKKNLIGALLFDSGETAEATRLKRTARRRYTRRKNRICYLQEIFSNEMAKVDDSFFHRLEESFLVEEDKKHERHPIFGNIVDEVAYHEKYPTIYHLRKKLVDSTDKADLRLIYLALAHMIKFRGHFLIEGDLNPDNSDVDKLFIQLVQTYNQLFEENPINASGVDAKAILSARLSKSRRLENLIAQLPGEKKNGLFGNLIALSLGLTPNFKSNFDLAEDAKLQLSKDTYDDDLDNLLAQIGDQYADLFLAAKNLSDAILLSDILRVNTEITKAPLSASMIKRYDEHHQDLTLLKALVRQQLPEKYKEIFFDQSKNGYAGYIDGGASQEEFYKFIKPILEKMDGTEELLVKLNREDLLRKQRTFDNGSIPHQIHLGELHAILRRQEDFYPFLKDNREKIEKILTFRIPYYVGPLARGNSRFAWMTRKSEETITPWNFEEVVDKGASAQSFIERMTNFDKNLPNEKVLPKHSLLYEYFTVYNELTKVKYVTEGMRKPAFLSGEQKKAIVDLLFKTNRKVTVKQLKEDYFKKIECFDSVEISGVEDRFNASLGTYHDLLKIIKDKDFLDNEENEDILEDIVLTLTLFEDREMIEERLKTYAHLFDDKVMKQLKRRRYTGWGRLSRKLINGIRDKQSGKTILDFLKSDGFANRNFMQLIHDDSLTFKEDIQKAQVSGQGDSLHEHIANLAGSPAIKKGILQTVKVVDELVKVMGRHKPENIVIEMARENQTTQKGQKNSRERMKRIEEGIKELGSQILKEHPVENTQLQNEKLYLYYLQNGRDMYVDQELDINRLSDYDVDHIVPQSFLKDDSIDNKVLTRSDKARGKSDNVPSEEVVKKMKNYWRQLLNAKLITQRKFDNLTKAERGGLSELDKAGFIKRQLVETRQITKHVAQILDSRMNTKYDENDKLIREVKVITLKSKLVSDFRKDFQFYKVREINNYHHAHDAYLNAVVGTALIKKYPKLESEFVYGDYKVYDVRKMIAKSEQEIGKATAKYFFYSNIMNFFKTEITLANGEIRKRPLIETNGETGEIVWDKGRDFATVRKVLSMPQVNIVKKTEVQTGGFSKESILPKRNSDKLIARKKDWDPKKYGGFDSPTVAYSVLVVAKVEKGKSKKLKSVKELLGITIMERSSFEKNPIDFLEAKGYKEVKKDLIIKLPKYSLFELENGRKRMLASAGELQKGNELALPSKYVNFLYLASHYEKLKGSPEDNEQKQLFVEQHKHYLDEIIEQISEFSKRVILADANLDKVLSAYNKHRDKPIREQAENIIHLFTLTNLGAPAAFKYFDTTIDRKRYTSTKEVLDATLIHQSITGLYETRIDLSQLGGDGGEAAAKPAPGSSGGTLGDQGSRGSDPLPEPRVTLTVEGIPTEFLVNTGAEHSVLTKPMGKMGSKRTVVAGATGSKVYPWTTKRLLKIGQKQVTHSFLVIPECPAPLLGRDLLTKLKAQIQFSTEGPQVTWEDRPAMCLVLNLEEEYRLHEKPVPPSIDPSWLQLFPMVWAEKAGMGLANQVPPVVVELKSDASPVAVRQYPMSKEAREGIRPHIQRFLDLGILVPCQSPWNTPLLPVKKPGTNDYRPVQDLREVNKRVQDIHPTVPNPYNLLSSLPPSHTWYSVLDLKDAFFCLKLHPNSQPLFAFEWRDPEKGNTGQLTWTRLPQGFKNSPTLFNEALHRDLASFRALNPQVVMLQYVDDLLVAAPTYRDCKEGTRRLLQELSKLGYRVSAKKAQLCREEVTYLGYLLKGGKRWLTPARKATVMKIPTPTTPRQVREFLGTAGFCRLWIPGFASLAAPLYPLTRPKVPFTWTEAHQEAFGRIKEALLSAPALALPDLTKPFALYVDEKEGVARGVLTQTLGPWRRPVAYLSKKLDPVASGWPTCLKAIAAVALLLKDADKLTLGQNVLVIAPHNLESIVRQPPDRWMTNARMTHYQSLLLNERVSFAPPAILNPATLLPVESDDTPIHICSEILAEETGTRPDLRDQPLPGVPAWYTDGSSFIMDGRRQAGAAIVDNKRTVWASNLPEGTSAQKAELIALTQALRLAEGKSINIYTDSRYAFATAHVHGAIYKQRGWLTSAGKDIKNKEEILALLEAIHLPKRVAIIHCPGHQRGTDPVATGNRKADEAAKQAAQSTRILTETTKNAGKRTADGSEFEKRTADGSEFESPKKKAKVE

SEQ ID NO: 7621 - protein, 2096 aa, synthetic construct
MPAAKRVKLDGGDKKYSIGLDIGTNSVGWAVITDEYKVPSKKFKVLGNTDRHSIKKNLIGALLFDSGETAEATRLKRTARRRYTRRKNRICYLQEIFSNEMAKVDDSFFHRLEESFLVEEDKKHERHPIFGNIVDEVAYHEKYPTIYHLRKKLVDSTDKADLRLIYLALAHMIKFRGHFLIEGDLNPDNSDVDKLFIQLVQTYNQLFEENPINASGVDAKAILSARLSKSRRLENLIAQLPGEKKNGLFGNLIALSLGLTPNFKSNFDLAEDAKLQLSKDTYDDDLDNLLAQIGDQYADLFLAAKNLSDAILLSDILRVNTEITKAPLSASMIKRYDEHHQDLTLLKALVRQQLPEKYKEIFFDQSKNGYAGYIDGGASQEEFYKFIKPILEKMDGTEELLVKLNREDLLRKQRTFDNGSIPHQIHLGELHAILRRQEDFYPFLKDNREKIEKILTFRIPYYVGPLARGNSRFAWMTRKSEETITPWNFEEVVDKGASAQSFIERMTNFDKNLPNEKVLPKHSLLYEYFTVYNELTKVKYVTEGMRKPAFLSGEQKKAIVDLLFKTNRKVTVKQLKEDYFKKIECFDSVEISGVEDRFNASLGTYHDLLKIIKDKDFLDNEENEDILEDIVLTLTLFEDREMIEERLKTYAHLFDDKVMKQLKRRRYTGWGRLSRKLINGIRDKQSGKTILDFLKSDGFANRNFMQLIHDDSLTFKEDIQKAQVSGQGDSLHEHIANLAGSPAIKKGILQTVKVVDELVKVMGRHKPENIVIEMARENQTTQKGQKNSRERMKRIEEGIKELGSQILKEHPVENTQLQNEKLYLYYLQNGRDMYVDQELDINRLSDYDVDHIVPQSFLKDDSIDNKVLTRSDKARGKSDNVPSEEVVKKMKNYWRQLLNAKLITQRKFDNLTKAERGGLSELDKAGFIKRQLVETRQITKHVAQILDSRMNTKYDENDKLIREVKVITLKSKLVSDFRKDFQFYKVREINNYHHAHDAYLNAVVGTALIKKYPKLESEFVYGDYKVYDVRKMIAKSEQEIGKATAKYFFYSNIMNFFKTEITLANGEIRKRPLIETNGETGEIVWDKGRDFATVRKVLSMPQVNIVKKTEVQTGGFSKESILPKRNSDKLIARKKDWDPKKYGGFDSPTVAYSVLVVAKVEKGKSKKLKSVKELLGITIMERSSFEKNPIDFLEAKGYKEVKKDLIIKLPKYSLFELENGRKRMLASAGELQKGNELALPSKYVNFLYLASHYEKLKGSPEDNEQKQLFVEQHKHYLDEIIEQISEFSKRVILADANLDKVLSAYNKHRDKPIREQAENIIHLFTLTNLGAPAAFKYFDTTIDRKRYTSTKEVLDATLIHQSITGLYETRIDLSQLGGDGGEAAAKPAPGSSGGTLNLEDEYRLYETSAEPEVSPGSTWLSDFPQAWAETGGMGLAVRQAPLIIPLKATSTPVSIKQYPMSQEAKLGIKPHIQRLLDQGILVPCQSPWNTPLLPVKKPGTNDYRPVQDLREVNKRVEDIHPTVPNPYNLLSGLPPSHRWYTVLDLKDAFFCLRLHPTSQPLFAFEWRDPGMGISGQLTWTRLPQGFKNSPTLFNEALHRDLADFRIQHPDLILLQYVDDILLAATSELDCQQGTRALLLTLGNLGYRASAKKAQLCQKQVKYLGYLLKEGQRWLTEARKETVMGQPTPKTPRQLREFLGKAGFCRLFIPGFAEMAAPLYPLTKPGTLFNWGPDQQKAYQEIKQALLTAPALGLPDLTKPFELFVDEKQGYAKGVLTQKLGPWRRPVAYLSKKLDPVAAGWPPCLRMVAAIAVLRKDAGKLTMGQPLVILAPHAVEALVKQPPDRWLSNARMTHYQAMLLDTDRVQFGPVVALNPATLLPLPEEGAPHDCLEILAETHGTRPDLTDQPIPDADHTWYTDGSSFLQEGQRKAGAAVTTETEVIWARALPAGTSAQRAELIALTQALKMAEGKRLNVYTDSRYAFATAHIHGEIYRRRGWLTSEGREIKNKSEILALLKALFLPKRLSIIHCLGHQKGDSAEARGNRLADQAAREAAIKTPPDTSTLLAGKRTADGSEFEKRTADGSEFESPKKKAKVE

SEQ ID NO: 7622 - protein, 2096 aa, synthetic construct
MPAAKRVKLDGGDKKYSIGLDIGTNSVGWAVITDEYKVPSKKFKVLGNTDRHSIKKNLIGALLFDSGETAEATRLKRTARRRYTRRKNRICYLQEIFSNEMAKVDDSFFHRLEESFLVEEDKKHERHPIFGNIVDEVAYHEKYPTIYHLRKKLVDSTDKADLRLIYLALAHMIKFRGHFLIEGDLNPDNSDVDKLFIQLVQTYNQLFEENPINASGVDAKAILSARLSKSRRLENLIAQLPGEKKNGLFGNLIALSLGLTPNFKSNFDLAEDAKLQLSKDTYDDDLDNLLAQIGDQYADLFLAAKNLSDAILLSDILRVNTEITKAPLSASMIKRYDEHHQDLTLLKALVRQQLPEKYKEIFFDQSKNGYAGYIDGGASQEEFYKFIKPILEKMDGTEELLVKLNREDLLRKQRTFDNGSIPHQIHLGELHAILRRQEDFYPFLKDNREKIEKILTFRIPYYVGPLARGNSRFAWMTRKSEETITPWNFEEVVDKGASAQSFIERMTNFDKNLPNEKVLPKHSLLYEYFTVYNELTKVKYVTEGMRKPAFLSGEQKKAIVDLLFKTNRKVTVKQLKEDYFKKIECFDSVEISGVEDRFNASLGTYHDLLKIIKDKDFLDNEENEDILEDIVLTLTLFEDREMIEERLKTYAHLFDDKVMKQLKRRRYTGWGRLSRKLINGIRDKQSGKTILDFLKSDGFANRNFMQLIHDDSLTFKEDIQKAQVSGQGDSLHEHIANLAGSPAIKKGILQTVKVVDELVKVMGRHKPENIVIEMARENQTTQKGQKNSRERMKRIEEGIKELGSQILKEHPVENTQLQNEKLYLYYLQNGRDMYVDQELDINRLSDYDVDHIVPQSFLKDDSIDNKVLTRSDKARGKSDNVPSEEVVKKMKNYWRQLLNAKLITQRKFDNLTKAERGGLSELDKAGFIKRQLVETRQITKHVAQILDSRMNTKYDENDKLIREVKVITLKSKLVSDFRKDFQFYKVREINNYHHAHDAYLNAVVGTALIKKYPKLESEFVYGDYKVYDVRKMIAKSEQEIGKATAKYFFYSNIMNFFKTEITLANGEIRKRPLIETNGETGEIVWDKGRDFATVRKVLSMPQVNIVKKTEVQTGGFSKESILPKRNSDKLIARKKDWDPKKYGGFDSPTVAYSVLVVAKVEKGKSKKLKSVKELLGITIMERSSFEKNPIDFLEAKGYKEVKKDLIIKLPKYSLFELENGRKRMLASAGELQKGNELALPSKYVNFLYLASHYEKLKGSPEDNEQKQLFVEQHKHYLDEIIEQISEFSKRVILADANLDKVLSAYNKHRDKPIREQAENIIHLFTLTNLGAPAAFKYFDTTIDRKRYTSTKEVLDATLIHQSITGLYETRIDLSQLGGDGGEAAAKPAPGSSGGTLNIEDEYRLHETSKGPDVPLGSTWLSDFPQAWAETGGMGLAFRQAPLIISLKATSTPVSIKQYPMSQEARLGIKPHIQRLLDQGILVPCQSPWNTPLLPVKKPGTNDYRPVQDLREVNKRVEDIHPTVPNPYNLLSGLPPSHQWYTVLDLKDAFFCLRLHPTSQSLFAFEWKDPEMGISGQLTWTRLPQGFKNSPTLFNEALHRDLADFRIQHPDLILLQYVDDLLLAATSELDCQQGTRALLQTLGDLGYRASAKKAQICQKQVKYLGYLLKEGQRWLTEARKETVMGQPTPKTPRQLREFLGKAGLCRLFIPGFAEMAAPLYPLTKPGTLFKWGPDQQKAYQEIKQALLTAPALGLPDLTKPFELFVDEKQGYAKGVLTQKLGPWRRPVAYLSKKLDPVAAGWPPCLRMVAAIAVLTKDVGKLTMGQPLVILAPHAVEALVKQPPDRWLSNARMTHYQALLLDTDRVQFGPIVALNPATLLPLPEEGLQHDCLDILAEAHGTRPDLTDQPLPDADHTWYTDGSSFLQEGQRRAGAAVTTETEVIWAKALPAGTSAQRAELIALTQALKMAAGKKLNVYTDSRYAFATAHIHGEIYRRRGWLTSEGKEIKNKDEILALLKALFLPKRLSIIHCPGHQKGNHAEARGNRMADQAAREVATRETPETSTLLAGKRTADGSEFEKRTADGSEFESPKKKAKVE

SEQ ID NO: 7623 - protein, 2096 aa, synthetic construct
MPAAKRVKLDGGDKKYSIGLDIGTNSVGWAVITDEYKVPSKKFKVLGNTDRHSIKKNLIGALLFDSGETAEATRLKRTARRRYTRRKNRICYLQEIFSNEMAKVDDSFFHRLEESFLVEEDKKHERHPIFGNIVDEVAYHEKYPTIYHLRKKLVDSTDKADLRLIYLALAHMIKFRGHFLIEGDLNPDNSDVDKLFIQLVQTYNQLFEENPINASGVDAKAILSARLSKSRRLENLIAQLPGEKKNGLFGNLIALSLGLTPNFKSNFDLAEDAKLQLSKDTYDDDLDNLLAQIGDQYADLFLAAKNLSDAILLSDILRVNTEITKAPLSASMIKRYDEHHQDLTLLKALVRQQLPEKYKEIFFDQSKNGYAGYIDGGASQEEFYKFIKPILEKMDGTEELLVKLNREDLLRKQRTFDNGSIPHQIHLGELHAILRRQEDFYPFLKDNREKIEKILTFRIPYYVGPLARGNSRFAWMTRKSEETITPWNFEEVVDKGASAQSFIERMTNFDKNLPNEKVLPKHSLLYEYFTVYNELTKVKYVTEGMRKPAFLSGEQKKAIVDLLFKTNRKVTVKQLKEDYFKKIECFDSVEISGVEDRFNASLGTYHDLLKIIKDKDFLDNEENEDILEDIVLTLTLFEDREMIEERLKTYAHLFDDKVMKQLKRRRYTGWGRLSRKLINGIRDKQSGKTILDFLKSDGFANRNFMQLIHDDSLTFKEDIQKAQVSGQGDSLHEHIANLAGSPAIKKGILQTVKVVDELVKVMGRHKPENIVIEMARENQTTQKGQKNSRERMKRIEEGIKELGSQILKEHPVENTQLQNEKLYLYYLQNGRDMYVDQELDINRLSDYDVDHIVPQSFLKDDSIDNKVLTRSDKARGKSDNVPSEEVVKKMKNYWRQLLNAKLITQRKFDNLTKAERGGLSELDKAGFIKRQLVETRQITKHVAQILDSRMNTKYDENDKLIREVKVITLKSKLVSDFRKDFQFYKVREINNYHHAHDAYLNAVVGTALIKKYPKLESEFVYGDYKVYDVRKMIAKSEQEIGKATAKYFFYSNIMNFFKTEITLANGEIRKRPLIETNGETGEIVWDKGRDFATVRKVLSMPQVNIVKKTEVQTGGFSKESILPKRNSDKLIARKKDWDPKKYGGFDSPTVAYSVLVVAKVEKGKSKKLKSVKELLGITIMERSSFEKNPIDFLEAKGYKEVKKDLIIKLPKYSLFELENGRKRMLASAGELQKGNELALPSKYVNFLYLASHYEKLKGSPEDNEQKQLFVEQHKHYLDEIIEQISEFSKRVILADANLDKVLSAYNKHRDKPIREQAENIIHLFTLTNLGAPAAFKYFDTTIDRKRYTSTKEVLDATLIHQSITGLYETRIDLSQLGGDGGEAAAKPAPGSSGGTLNIEDEHRLHETSKEPDVSLGSTWLSDFPQAWAETGGMGLAVRQAPLIIPLKATSTPVSIKQYPMSQEARLGIKPHIQRLLDQGILVPCQSPWNTPLLPVKKPGTNDYRPVQDLREVNKRVEDIHPTVPNPYNLLSGLPPSHQWYTVLDLKDAFFCLRLHPTSQPLFAFEWRDPEMGISGQLTWTRLPQGFKNSPTLFDEALHRDLADFRIQHPDLILLQYVDDLLLAATSELDCQQGTRALLQTLGNLGYRASAKKAQICQKQVKYLGYLLKEGQRWLTEARKETVMGQPTPKTPRQLREFLGTAGFCRLWIPGFAEMAAPLYPLTKTGTLFNWGPDQQKAYQEIKQALLTAPALGLPDLTKPFELFVDEKQGYAKGVLTQKLGPWRRPVAYLSKKLDPVAAGWPPCLRMVAAIAVLTKDAGKLTMGQPLVILAPHAVEALVKQPPDRWLSNARMTHYQALLLDTDRVQFGPVVALNPATLLPLPEEGLQHNCLDILAEAHGTRPDLTDQPLPDADHTWYTDGSSLLQEGQRKAGAAVTTETEVIWAKALPAGTSAQRAELIALTQALKMAEGKKLNVYTDSRYAFATAHIHGEIYRRRGLLTSEGKEIKNKDEILALLKALFLPKRLSIIHCPGHQKGHSAEARGNRMADQAARKAAITETPDTSTLLAGKRTADGSEFEKRTADGSEFESPKKKAKVE

SEQ ID NO: 7624 - protein, 2090 aa, synthetic construct
MPAAKRVKLDGGDKKYSIGLDIGTNSVGWAVITDEYKVPSKKFKVLGNTDRHSIKKNLIGALLFDSGETAEATRLKRTARRRYTRRKNRICYLQEIFSNEMAKVDDSFFHRLEESFLVEEDKKHERHPIFGNIVDEVAYHEKYPTIYHLRKKLVDSTDKADLRLIYLALAHMIKFRGHFLIEGDLNPDNSDVDKLFIQLVQTYNQLFEENPINASGVDAKAILSARLSKSRRLENLIAQLPGEKKNGLFGNLIALSLGLTPNFKSNFDLAEDAKLQLSKDTYDDDLDNLLAQIGDQYADLFLAAKNLSDAILLSDILRVNTEITKAPLSASMIKRYDEHHQDLTLLKALVRQQLPEKYKEIFFDQSKNGYAGYIDGGASQEEFYKFIKPILEKMDGTEELLVKLNREDLLRKQRTFDNGSIPHQIHLGELHAILRRQEDFYPFLKDNREKIEKILTFRIPYYVGPLARGNSRFAWMTRKSEETITPWNFEEVVDKGASAQSFIERMTNFDKNLPNEKVLPKHSLLYEYFTVYNELTKVKYVTEGMRKPAFLSGEQKKAIVDLLFKTNRKVTVKQLKEDYFKKIECFDSVEISGVEDRFNASLGTYHDLLKIIKDKDFLDNEENEDILEDIVLTLTLFEDREMIEERLKTYAHLFDDKVMKQLKRRRYTGWGRLSRKLINGIRDKQSGKTILDFLKSDGFANRNFMQLIHDDSLTFKEDIQKAQVSGQGDSLHEHIANLAGSPAIKKGILQTVKVVDELVKVMGRHKPENIVIEMARENQTTQKGQKNSRERMKRIEEGIKELGSQILKEHPVENTQLQNEKLYLYYLQNGRDMYVDQELDINRLSDYDVDHIVPQSFLKDDSIDNKVLTRSDKARGKSDNVPSEEVVKKMKNYWRQLLNAKLITQRKFDNLTKAERGGLSELDKAGFIKRQLVETRQITKHVAQILDSRMNTKYDENDKLIREVKVITLKSKLVSDFRKDFQFYKVREINNYHHAHDAYLNAVVGTALIKKYPKLESEFVYGDYKVYDVRKMIAKSEQEIGKATAKYFFYSNIMNFFKTEITLANGEIRKRPLIETNGETGEIVWDKGRDFATVRKVLSMPQVNIVKKTEVQTGGFSKESILPKRNSDKLIARKKDWDPKKYGGFDSPTVAYSVLVVAKVEKGKSKKLKSVKELLGITIMERSSFEKNPIDFLEAKGYKEVKKDLIIKLPKYSLFELENGRKRMLASAGELQKGNELALPSKYVNFLYLASHYEKLKGSPEDNEQKQLFVEQHKHYLDEIIEQISEFSKRVILADANLDKVLSAYNKHRDKPIREQAENIIHLFTLTNLGAPAAFKYFDTTIDRKRYTSTKEVLDATLIHQSITGLYETRIDLSQLGGDGGEAAAKPAPGSSGGTLQLDDEYRLYSPLVKPDQNIQFWLEQFPQAWAETAGMGLAKQVPPQVIQLKASATPVSVRQYPLSKEAQEGIRPHVQRLIQQGILVPVQSPWNTPLLPVRKPGTNDYRPVQDLREVNKRVQDIHPTVPNPYNLLCALPPQRSWYTVLDLKDAFFCLRLHPTSQPLFAFEWRDPGTGRTGQLTWTRLPQGFKNSPTIFDEALHRDLANFRIQHPQVTLLQYVDDLLLAGATKQDCLEGTKALLLELSDLGYRASAKKAQICRREVTYLGYSLRDGQRWLTEARKKTVVQIPAPTTAKQVREFLGTAGFCRLWIPGFATLAAPLYPLTKEKGEFSWAPEHQKAFDAIKKALLSAPALALPDVTKPFTLYVDERKGVARGVLTQTLGPWRRPVAYLSKKLDPVASGWPVCLKAIAAVAILVKDADKLTLGQNITVIAPHALENIVRQPPDRWMTNARMTHYQSLLLTERVTFAPPAALNPATLLPEETDEPVTHDCHQLLIEETGVRKDLTDIPLTGEVLTWFTDGSSYVVEGKRMAGAAVVDGTRTIWASSLPEGTSAQKAELMALTQALRLAEGKSINIYTDSRYAFATAHVHGAIYKQRGLLTSAGREIKNKEEILSLLEALHLPKRLAIIHCPGHQKAKDPISRGNQMADRVAKQAAQGVNLLAGKRTADGSEFEKRTADGSEFESPKKKAKVE

SEQ ID NO: 7625 - protein, 2096 aa, synthetic construct
MPAAKRVKLDGGDKKYSIGLDIGTNSVGWAVITDEYKVPSKKFKVLGNTDRHSIKKNLIGALLFDSGETAEATRLKRTARRRYTRRKNRICYLQEIFSNEMAKVDDSFFHRLEESFLVEEDKKHERHPIFGNIVDEVAYHEKYPTIYHLRKKLVDSTDKADLRLIYLALAHMIKFRGHFLIEGDLNPDNSDVDKLFIQLVQTYNQLFEENPINASGVDAKAILSARLSKSRRLENLIAQLPGEKKNGLFGNLIALSLGLTPNFKSNFDLAEDAKLQLSKDTYDDDLDNLLAQIGDQYADLFLAAKNLSDAILLSDILRVNTEITKAPLSASMIKRYDEHHQDLTLLKALVRQQLPEKYKEIFFDQSKNGYAGYIDGGASQEEFYKFIKPILEKMDGTEELLVKLNREDLLRKQRTFDNGSIPHQIHLGELHAILRRQEDFYPFLKDNREKIEKILTFRIPYYVGPLARGNSRFAWMTRKSEETITPWNFEEVVDKGASAQSFIERMTNFDKNLPNEKVLPKHSLLYEYFTVYNELTKVKYVTEGMRKPAFLSGEQKKAIVDLLFKTNRKVTVKQLKEDYFKKIECFDSVEISGVEDRFNASLGTYHDLLKIIKDKDFLDNEENEDILEDIVLTLTLFEDREMIEERLKTYAHLFDDKVMKQLKRRRYTGWGRLSRKLINGIRDKQSGKTILDFLKSDGFANRNFMQLIHDDSLTFKEDIQKAQVSGQGDSLHEHIANLAGSPAIKKGILQTVKVVDELVKVMGRHKPENIVIEMARENQTTQKGQKNSRERMKRIEEGIKELGSQILKEHPVENTQLQNEKLYLYYLQNGRDMYVDQELDINRLSDYDVDHIVPQSFLKDDSIDNKVLTRSDKARGKSDNVPSEEVVKKMKNYWRQLLNAKLITQRKFDNLTKAERGGLSELDKAGFIKRQLVETRQITKHVAQILDSRMNTKYDENDKLIREVKVITLKSKLVSDFRKDFQFYKVREINNYHHAHDAYLNAVVGTALIKKYPKLESEFVYGDYKVYDVRKMIAKSEQEIGKATAKYFFYSNIMNFFKTEITLANGEIRKRPLIETNGETGEIVWDKGRDFATVRKVLSMPQVNIVKKTEVQTGGFSKESILPKRNSDKLIARKKDWDPKKYGGFDSPTVAYSVLVVAKVEKGKSKKLKSVKELLGITIMERSSFEKNPIDFLEAKGYKEVKKDLIIKLPKYSLFELENGRKRMLASAGELQKGNELALPSKYVNFLYLASHYEKLKGSPEDNEQKQLFVEQHKHYLDEIIEQISEFSKRVILADANLDKVLSAYNKHRDKPIREQAENIIHLFTLTNLGAPAAFKYFDTTIDRKRYTSTKEVLDATLIHQSITGLYETRIDLSQLGGDGGEAAAKPAPGSSGGTLNIEDEYRLHETSKEPDVPLGSTWLSDFPQAWAETGGMGLAVRQAPLIIPLKATSTPVSIKQYPMSQEARLGIKPHIQRLLDQGILVPCQSPWNTPLLPVKKPGTNDYRPVQDLREVNKRVEDIHPTVPNPYNLLSGLPPSHQWYTVLDLKDAFFCLRLHPTSQPLFAFEWRDPEMGISGQLTWTRLPQGFKNSPTLFNEALHRDLADFRIQHPDLILLQYVDDLLLAATSEQDCQRGTRALLQTLGNLGYRASAKKAQICQKQVKYLGYLLKEGQRWLTEARKETVMGQPTPKTPRQLREFLGTAGFCRLWIPGFAEMAAPLYPLTKPGTLFNWGPDQQKAYQEIKQALLTAPALGLPDLTKPFELFVDEKQGYAKGVLTQKLGPWRRPVAYLSKKLDPVAAGWPPCLRMVAAIAVLTKDAGKLTMGQPLVILAPHAVEALVKQPPDRWLSNARMTHYQAMLLDTDRVQFGPVVALNPATLLPLPEKEAPHDCLEILAETHGTRPDLTDQPIPDADYTWYTDGSSFLQEGQRRAGAAVTTETEVIWARALPAGTSAQRAELIALTQALKMAEGKKLNVYTDSRYAFATAHVHGEIYRRRGWLTSEGREIKNKNEILALLKALFLPKRLSIIHCPGHQKGNSAEARGNRMADQAAREAAMKAVLETSTLLAGKRTADGSEFEKRTADGSEFESPKKKAKVE

SEQ ID NO: 7626 - protein, 2098 aa, synthetic construct
MPAAKRVKLDGGDKKYSIGLDIGTNSVGWAVITDEYKVPSKKFKVLGNTDRHSIKKNLIGALLFDSGETAEATRLKRTARRRYTRRKNRICYLQEIFSNEMAKVDDSFFHRLEESFLVEEDKKHERHPIFGNIVDEVAYHEKYPTIYHLRKKLVDSTDKADLRLIYLALAHMIKFRGHFLIEGDLNPDNSDVDKLFIQLVQTYNQLFEENPINASGVDAKAILSARLSKSRRLENLIAQLPGEKKNGLFGNLIALSLGLTPNFKSNFDLAEDAKLQLSKDTYDDDLDNLLAQIGDQYADLFLAAKNLSDAILLSDILRVNTEITKAPLSASMIKRYDEHHQDLTLLKALVRQQLPEKYKEIFFDQSKNGYAGYIDGGASQEEFYKFIKPILEKMDGTEELLVKLNREDLLRKQRTFDNGSIPHQIHLGELHAILRRQEDFYPFLKDNREKIEKILTFRIPYYVGPLARGNSRFAWMTRKSEETITPWNFEEVVDKGASAQSFIERMTNFDKNLPNEKVLPKHSLLYEYFTVYNELTKVKYVTEGMRKPAFLSGEQKKAIVDLLFKTNRKVTVKQLKEDYFKKIECFDSVEISGVEDRFNASLGTYHDLLKIIKDKDFLDNEENEDILEDIVLTLTLFEDREMIEERLKTYAHLFDDKVMKQLKRRRYTGWGRLSRKLINGIRDKQSGKTILDFLKSDGFANRNFMQLIHDDSLTFKEDIQKAQVSGQGDSLHEHIANLAGSPAIKKGILQTVKVVDELVKVMGRHKPENIVIEMARENQTTQKGQKNSRERMKRIEEGIKELGSQILKEHPVENTQLQNEKLYLYYLQNGRDMYVDQELDINRLSDYDVDHIVPQSFLKDDSIDNKVLTRSDKARGKSDNVPSEEVVKKMKNYWRQLLNAKLITQRKFDNLTKAERGGLSELDKAGFIKRQLVETRQITKHVAQILDSRMNTKYDENDKLIREVKVITLKSKLVSDFRKDFQFYKVREINNYHHAHDAYLNAVVGTALIKKYPKLESEFVYGDYKVYDVRKMIAKSEQEIGKATAKYFFYSNIMNFFKTEITLANGEIRKRPLIETNGETGEIVWDKGRDFATVRKVLSMPQVNIVKKTEVQTGGFSKESILPKRNSDKLIARKKDWDPKKYGGFDSPTVAYSVLVVAKVEKGKSKKLKSVKELLGITIMERSSFEKNPIDFLEAKGYKEVKKDLIIKLPKYSLFELENGRKRMLASAGELQKGNELALPSKYVNFLYLASHYEKLKGSPEDNEQKQLFVEQHKHYLDEIIEQISEFSKRVILADANLDKVLSAYNKHRDKPIREQAENIIHLFTLTNLGAPAAFKYFDTTIDRKRYTSTKEVLDATLIHQSITGLYETRIDLSQLGGDGGPAPGSSEAAAKGGTAPLEEEYRLFLEAPIQNVTLLEQWKREIPKVWAEINPPGLASTQAPIHVQLLSTALPVRVRQYPITLEAKRSLRETIRKFRAAGILRPVHSPWNTPLLPVRKSGTSEYRMVQDLREVNKRVETIHPTVPNPYTLLSLLPPDRIWYSVLDLKDAFFCIPLAPESQLIFAFEWADAEEGESGQLTWTRLPQGFKNSPTLFNEALNRDLQGFRLDHPSVSLLQYVDDLLIAADTQAACLSATRDLLMTLAELGYRVSGKKAQLCQEEVTYLGFKIHKGSRSLSNSRTQAILQIPVPKTKRQVREFLGTIGYCRLWIPGFAELAQPLYAATRPGNDPLVWGEKEEEAFQSLKLALTQPPALALPSLDKPFQLFVEETSGAAKGVLTQALGPWKRPVAYLSKRLDPVAAGWPRCLRAIAAAALLTREASKLTFGQDIEITSSHNLESLLRSPPDKWLTNARITQYQVLLLDPPRVRFKQTAALNPATLLPETDDTLPIHHCLDTLDSLTSTRPDLTDQPLAQAEATLFTDGSSYIRDGKRYAGAAVVTLDSVIWAEPLPIGTSAQKAELIALTKALEWSKDKSVNIYTDSRYAFATLHVHGMIYRERGWLTAGGKAIKNAPEILALLTAVWLPKRVAVMHCKGHQKDDAPTSTGNRRADEVAREVAIRPLSTQATISAGKRTADGSEFEKRTADGSEFESPKKKAKVE

SEQ ID NO: 7627 - protein, 2098 aa, synthetic construct
MPAAKRVKLDGGDKKYSIGLDIGTNSVGWAVITDEYKVPSKKFKVLGNTDRHSIKKNLIGALLFDSGETAEATRLKRTARRRYTRRKNRICYLQEIFSNEMAKVDDSFFHRLEESFLVEEDKKHERHPIFGNIVDEVAYHEKYPTIYHLRKKLVDSTDKADLRLIYLALAHMIKFRGHFLIEGDLNPDNSDVDKLFIQLVQTYNQLFEENPINASGVDAKAILSARLSKSRRLENLIAQLPGEKKNGLFGNLIALSLGLTPNFKSNFDLAEDAKLQLSKDTYDDDLDNLLAQIGDQYADLFLAAKNLSDAILLSDILRVNTEITKAPLSASMIKRYDEHHQDLTLLKALVRQQLPEKYKEIFFDQSKNGYAGYIDGGASQEEFYKFIKPILEKMDGTEELLVKLNREDLLRKQRTFDNGSIPHQIHLGELHAILRRQEDFYPFLKDNREKIEKILTFRIPYYVGPLARGNSRFAWMTRKSEETITPWNFEEVVDKGASAQSFIERMTNFDKNLPNEKVLPKHSLLYEYFTVYNELTKVKYVTEGMRKPAFLSGEQKKAIVDLLFKTNRKVTVKQLKEDYFKKIECFDSVEISGVEDRFNASLGTYHDLLKIIKDKDFLDNEENEDILEDIVLTLTLFEDREMIEERLKTYAHLFDDKVMKQLKRRRYTGWGRLSRKLINGIRDKQSGKTILDFLKSDGFANRNFMQLIHDDSLTFKEDIQKAQVSGQGDSLHEHIANLAGSPAIKKGILQTVKVVDELVKVMGRHKPENIVIEMARENQTTQKGQKNSRERMKRIEEGIKELGSQILKEHPVENTQLQNEKLYLYYLQNGRDMYVDQELDINRLSDYDVDHIVPQSFLKDDSIDNKVLTRSDKARGKSDNVPSEEVVKKMKNYWRQLLNAKLITQRKFDNLTKAERGGLSELDKAGFIKRQLVETRQITKHVAQILDSRMNTKYDENDKLIREVKVITLKSKLVSDFRKDFQFYKVREINNYHHAHDAYLNAVVGTALIKKYPKLESEFVYGDYKVYDVRKMIAKSEQEIGKATAKYFFYSNIMNFFKTEITLANGEIRKRPLIETNGETGEIVWDKGRDFATVRKVLSMPQVNIVKKTEVQTGGFSKESILPKRNSDKLIARKKDWDPKKYGGFDSPTVAYSVLVVAKVEKGKSKKLKSVKELLGITIMERSSFEKNPIDFLEAKGYKEVKKDLIIKLPKYSLFELENGRKRMLASAGELQKGNELALPSKYVNFLYLASHYEKLKGSPEDNEQKQLFVEQHKHYLDEIIEQISEFSKRVILADANLDKVLSAYNKHRDKPIREQAENIIHLFTLTNLGAPAAFKYFDTTIDRKRYTSTKEVLDATLIHQSITGLYETRIDLSQLGGDGGPAPGSSEAAAKGGTAPLEEEYRLFLEAPIQNVTLLEQWKREIPKVWAEINPPGLASTQAPIHVQLLSTALPVRVRQYPITLEAKRSLRETIRKFRAAGILRPVHSPWNTPLLPVRKSGTSEYRMVQDLREVNKRVETIHPTVPNPYTLLSLLPPDRIWYSVLDLKDAFFCIPLAPESQLIFAFEWADAEEGESGQLTWTRLPQGFKNSPTLFNEALNRDLQGFRLDHPSVSLLQYVDDLLIAADTQAACLSATRDLLMTLAELGYRVSGKKAQLCQEEVTYLGFKIHKGSRSLSNSRTQAILQIPVPKTKRQVREFLGKIGYCRLFIPGFAELAQPLYAATRPGNDPLVWGEKEEEAFQSLKLALTQPPALALPSLDKPFQLFVEETSGAAKGVLTQALGPWKRPVAYLSKRLDPVAAGWPRCLRAIAAAALLTREASKLTFGQDIEITSSHNLESLLRSPPDKWLTNARITQYQVLLLDPPRVRFKQTAALNPATLLPETDDTLPIHHCLDTLDSLTSTRPDLTDQPLAQAEATLFTDGSSYIRDGKRYAGAAVVTLDSVIWAEPLPIGTSAQKAELIALTKALEWSKDKSVNIYTDSRYAFATLHVHGMIYRERGWLTAGGKAIKNAPEILALLTAVWLPKRVAVMHCKGHQKDDAPTSTGNRRADEVAREVAIRPLSTQATISAGKRTADGSEFEKRTADGSEFESPKKKAKVE

SEQ ID NO: 7628 - protein, 2087 aa, synthetic construct
MPAAKRVKLDGGDKKYSIGLDIGTNSVGWAVITDEYKVPSKKFKVLGNTDRHSIKKNLIGALLFDSGETAEATRLKRTARRRYTRRKNRICYLQEIFSNEMAKVDDSFFHRLEESFLVEEDKKHERHPIFGNIVDEVAYHEKYPTIYHLRKKLVDSTDKADLRLIYLALAHMIKFRGHFLIEGDLNPDNSDVDKLFIQLVQTYNQLFEENPINASGVDAKAILSARLSKSRRLENLIAQLPGEKKNGLFGNLIALSLGLTPNFKSNFDLAEDAKLQLSKDTYDDDLDNLLAQIGDQYADLFLAAKNLSDAILLSDILRVNTEITKAPLSASMIKRYDEHHQDLTLLKALVRQQLPEKYKEIFFDQSKNGYAGYIDGGASQEEFYKFIKPILEKMDGTEELLVKLNREDLLRKQRTFDNGSIPHQIHLGELHAILRRQEDFYPFLKDNREKIEKILTFRIPYYVGPLARGNSRFAWMTRKSEETITPWNFEEVVDKGASAQSFIERMTNFDKNLPNEKVLPKHSLLYEYFTVYNELTKVKYVTEGMRKPAFLSGEQKKAIVDLLFKTNRKVTVKQLKEDYFKKIECFDSVEISGVEDRFNASLGTYHDLLKIIKDKDFLDNEENEDILEDIVLTLTLFEDREMIEERLKTYAHLFDDKVMKQLKRRRYTGWGRLSRKLINGIRDKQSGKTILDFLKSDGFANRNFMQLIHDDSLTFKEDIQKAQVSGQGDSLHEHIANLAGSPAIKKGILQTVKVVDELVKVMGRHKPENIVIEMARENQTTQKGQKNSRERMKRIEEGIKELGSQILKEHPVENTQLQNEKLYLYYLQNGRDMYVDQELDINRLSDYDVDHIVPQSFLKDDSIDNKVLTRSDKARGKSDNVPSEEVVKKMKNYWRQLLNAKLITQRKFDNLTKAERGGLSELDKAGFIKRQLVETRQITKHVAQILDSRMNTKYDENDKLIREVKVITLKSKLVSDFRKDFQFYKVREINNYHHAHDAYLNAVVGTALIKKYPKLESEFVYGDYKVYDVRKMIAKSEQEIGKATAKYFFYSNIMNFFKTEITLANGEIRKRPLIETNGETGEIVWDKGRDFATVRKVLSMPQVNIVKKTEVQTGGFSKESILPKRNSDKLIARKKDWDPKKYGGFDSPTVAYSVLVVAKVEKGKSKKLKSVKELLGITIMERSSFEKNPIDFLEAKGYKEVKKDLIIKLPKYSLFELENGRKRMLASAGELQKGNELALPSKYVNFLYLASHYEKLKGSPEDNEQKQLFVEQHKHYLDEIIEQISEFSKRVILADANLDKVLSAYNKHRDKPIREQAENIIHLFTLTNLGAPAAFKYFDTTIDRKRYTSTKEVLDATLIHQSITGLYETRIDLSQLGGDGGPAPGSSEAAAKGGVPWILKKPLELTIKLDLEEQQGTLLNNSILSKKGKEELKQLFEKYSALWQSWENQVGHRRIRPHKIATGTVKPTPQKQYHINPKAKPDIQIVINDLLKQGVLIQKESTMNTPVYPVPKPNGRWRMVLDYRAVNKVTPLIAVQNQHSYGILGSLFKGRYKTTIDLSNGFWAHPIVPEDYWITAFTWQGKQYCWTVLPQGFLNSPGLFTGDVVDLLQGIPNVEVYVDDVYISHDSEKEHLEYLDILFNRLKEAGYIISLKKSNIANSIVDFLGFQITNEGRGLTDTFKEKLENITAPTTLKQLQSILGLLNFARNFIPDFTELIAPLYALIPKSTKNYVPWQIEHSTTLETLITKLNGAEYLQGRKGDKTLIMKVNASYTTGYIRYYNEGEKKPISYVSIVFSKTELKFTELEKLLTTVHKGLLKALDLSMGQNIHVYSPIVSMQNIQKTPQTAKKALASRWLSWLSYLEDPRIRFFYDPQMPALKDLPAVDTGKDNKKHPSNFQHIFYTDGSAITSPTKEGHLNAGMGIVYFINKDGNLQKQQEWSISLGNHTAQFAEIAAFEFALKKCLPLGGNILVVTDSNYVAKAYNEELDVWASNGFVNNRKKPLKHISKWKSVADLKRLRPDVVVTHEPGHQKLDSSPHAYGNNLADQLATQASFKVHAGKRTADGSEFEKRTADGSEFESPKKKAKVE

SEQ ID NO: 7629 - protein, 2095 aa, synthetic construct
MPAAKRVKLDGGDKKYSIGLDIGTNSVGWAVITDEYKVPSKKFKVLGNTDRHSIKKNLIGALLFDSGETAEATRLKRTARRRYTRRKNRICYLQEIFSNEMAKVDDSFFHRLEESFLVEEDKKHERHPIFGNIVDEVAYHEKYPTIYHLRKKLVDSTDKADLRLIYLALAHMIKFRGHFLIEGDLNPDNSDVDKLFIQLVQTYNQLFEENPINASGVDAKAILSARLSKSRRLENLIAQLPGEKKNGLFGNLIALSLGLTPNFKSNFDLAEDAKLQLSKDTYDDDLDNLLAQIGDQYADLFLAAKNLSDAILLSDILRVNTEITKAPLSASMIKRYDEHHQDLTLLKALVRQQLPEKYKEIFFDQSKNGYAGYIDGGASQEEFYKFIKPILEKMDGTEELLVKLNREDLLRKQRTFDNGSIPHQIHLGELHAILRRQEDFYPFLKDNREKIEKILTFRIPYYVGPLARGNSRFAWMTRKSEETITPWNFEEVVDKGASAQSFIERMTNFDKNLPNEKVLPKHSLLYEYFTVYNELTKVKYVTEGMRKPAFLSGEQKKAIVDLLFKTNRKVTVKQLKEDYFKKIECFDSVEISGVEDRFNASLGTYHDLLKIIKDKDFLDNEENEDILEDIVLTLTLFEDREMIEERLKTYAHLFDDKVMKQLKRRRYTGWGRLSRKLINGIRDKQSGKTILDFLKSDGFANRNFMQLIHDDSLTFKEDIQKAQVSGQGDSLHEHIANLAGSPAIKKGILQTVKVVDELVKVMGRHKPENIVIEMARENQTTQKGQKNSRERMKRIEEGIKELGSQILKEHPVENTQLQNEKLYLYYLQNGRDMYVDQELDINRLSDYDVDHIVPQSFLKDDSIDNKVLTRSDKARGKSDNVPSEEVVKKMKNYWRQLLNAKLITQRKFDNLTKAERGGLSELDKAGFIKRQLVETRQITKHVAQILDSRMNTKYDENDKLIREVKVITLKSKLVSDFRKDFQFYKVREINNYHHAHDAYLNAVVGTALIKKYPKLESEFVYGDYKVYDVRKMIAKSEQEIGKATAKYFFYSNIMNFFKTEITLANGEIRKRPLIETNGETGEIVWDKGRDFATVRKVLSMPQVNIVKKTEVQTGGFSKESILPKRNSDKLIARKKDWDPKKYGGFDSPTVAYSVLVVAKVEKGKSKKLKSVKELLGITIMERSSFEKNPIDFLEAKGYKEVKKDLIIKLPKYSLFELENGRKRMLASAGELQKGNELALPSKYVNFLYLASHYEKLKGSPEDNEQKQLFVEQHKHYLDEIIEQISEFSKRVILADANLDKVLSAYNKHRDKPIREQAENIIHLFTLTNLGAPAAFKYFDTTIDRKRYTSTKEVLDATLIHQSITGLYETRIDLSQLGGDGGPAPGSSEAAAKGGTLQLEEEYRLFEPESTQKQEMDIWLKNFPQAWAETGGMGTAHCQAPVLIQLKATATPISIRQYPMPHEAYQGIKPHIRRMLDQGILKPCQSPWNTPLLPVKKPGTEDYRPVQDLREVNKRVEDIHPTVPNPYNLLSTLPPSHPWYTVLDLKDAFFCLRLHSESQLLFAFEWRDPEIGLSGQLTWTRLPQGFKNSPTLFNEALHSDLADFRVRYPALVLLQYVDDLLLAAATRTECLEGTKALLETLGNKGYRASAKKAQICLQEVTYLGYSLKDGQRWLTKARKEAILSIPVPKNSRQVREFLGTAGYCRLWIPGFAELAAPLYPLTRPGTLFQWGTEQQLAFEDIKKALLSSPALGLPDITKPFELFIDENSGFAKGVLVQKLGPWKRPVAYLSKKLDTVASGWPPCLRMVAAIAILVKDAGKLTLGQPLTILTSHPVEALVRQPPNKWLSNARMTHYQAMLLDAERVHFGPTVSLNPATLLPLPSGGNHHDCLQILAETHGTRPDLTDQPLPDADLTWYTDGSSFIRNGEREAGAAVTTESEVIWAAPLPPGTSAQRAELIALTQALKMAEGKKLTVYTDSRYAFATTHVHGEIYRRRGWLTSEGKEIKNKNEILALLEALFLPKRLSIIHCPGHQKGDSPQAKGNRLADDTAKKAATETHSSLTVLPAGKRTADGSEFEKRTADGSEFESPKKKAKVE

SEQ ID NO: 7630 - protein, 2094 aa, synthetic construct
MPAAKRVKLDGGDKKYSIGLDIGTNSVGWAVITDEYKVPSKKFKVLGNTDRHSIKKNLIGALLFDSGETAEATRLKRTARRRYTRRKNRICYLQEIFSNEMAKVDDSFFHRLEESFLVEEDKKHERHPIFGNIVDEVAYHEKYPTIYHLRKKLVDSTDKADLRLIYLALAHMIKFRGHFLIEGDLNPDNSDVDKLFIQLVQTYNQLFEENPINASGVDAKAILSARLSKSRRLENLIAQLPGEKKNGLFGNLIALSLGLTPNFKSNFDLAEDAKLQLSKDTYDDDLDNLLAQIGDQYADLFLAAKNLSDAILLSDILRVNTEITKAPLSASMIKRYDEHHQDLTLLKALVRQQLPEKYKEIFFDQSKNGYAGYIDGGASQEEFYKFIKPILEKMDGTEELLVKLNREDLLRKQRTFDNGSIPHQIHLGELHAILRRQEDFYPFLKDNREKIEKILTFRIPYYVGPLARGNSRFAWMTRKSEETITPWNFEEVVDKGASAQSFIERMTNFDKNLPNEKVLPKHSLLYEYFTVYNELTKVKYVTEGMRKPAFLSGEQKKAIVDLLFKTNRKVTVKQLKEDYFKKIECFDSVEISGVEDRFNASLGTYHDLLKIIKDKDFLDNEENEDILEDIVLTLTLFEDREMIEERLKTYAHLFDDKVMKQLKRRRYTGWGRLSRKLINGIRDKQSGKTILDFLKSDGFANRNFMQLIHDDSLTFKEDIQKAQVSGQGDSLHEHIANLAGSPAIKKGILQTVKVVDELVKVMGRHKPENIVIEMARENQTTQKGQKNSRERMKRIEEGIKELGSQILKEHPVENTQLQNEKLYLYYLQNGRDMYVDQELDINRLSDYDVDHIVPQSFLKDDSIDNKVLTRSDKARGKSDNVPSEEVVKKMKNYWRQLLNAKLITQRKFDNLTKAERGGLSELDKAGFIKRQLVETRQITKHVAQILDSRMNTKYDENDKLIREVKVITLKSKLVSDFRKDFQFYKVREINNYHHAHDAYLNAVVGTALIKKYPKLESEFVYGDYKVYDVRKMIAKSEQEIGKATAKYFFYSNIMNFFKTEITLANGEIRKRPLIETNGETGEIVWDKGRDFATVRKVLSMPQVNIVKKTEVQTGGFSKESILPKRNSDKLIARKKDWDPKKYGGFDSPTVAYSVLVVAKVEKGKSKKLKSVKELLGITIMERSSFEKNPIDFLEAKGYKEVKKDLIIKLPKYSLFELENGRKRMLASAGELQKGNELALPSKYVNFLYLASHYEKLKGSPEDNEQKQLFVEQHKHYLDEIIEQISEFSKRVILADANLDKVLSAYNKHRDKPIREQAENIIHLFTLTNLGAPAAFKYFDTTIDRKRYTSTKEVLDATLIHQSITGLYETRIDLSQLGGDGGPAPGSSEAAAKGGVLNLEEEYRLHEKPVPSSIDPSWLQLFPTVWAERAGMGLANQVPPVVVELRSGASPVAVRQYPMSKEAREGIRPHIQKFLDLGVLVPCRSPWNTPLLPVKKPGTNDYRPVQDLREINKRVQDIHPTVPNPYNLLSSLPPSYTWYSVLDLKDAFFCLRLHPNSQPLFAFEWKDPEKGNTGQLTWTRLPQGFKNSPTLFNEALHRDLAPFRALNPQVVLLQYVDDLLVAAPTYEDCKKGTQKLLQELSKLGYRVSAKKAQLCQREVTYLGYLLKEGKRWLTPARKATVMKIPVPTTPRQVREFLGKAGFCRLFIPGFASLAAPLYPLTKPSIPFIWTEEHQQAFDHIKKALLSAPALALPDLTKPFTLYIDERAGVARGVLTQTLGPWRRPVAYLSKKLDPVASGWPTCLKAVAAVALLLKDADKLTLGQNVTVIASHSLESIVRQPPDRWMTNARMTHYQSLLLNERVSFAPPAVLNPATLLPVESEATPVHRCSEILAEETGTRRDLEDQPLPGVPTWYTDGSSFITEGKRRAGAPIVDGKRTVWASSLPEGTSAQKAELVALTQALRLAEGKNINIYTDSRYAFATAHIHGAIYKQRGWLTSAGKDIKNKEEILALLEAIHLPRRVAIIHCPGHQRGSNPVATGNRRADEAAKQAALSTRVLAGTTKPAGKRTADGSEFEKRTADGSEFESPKKKAKVE

SEQ ID NO: 7631 - protein, 2218 aa, synthetic construct
MPAAKRVKLDGGDKKYSIGLDIGTNSVGWAVITDEYKVPSKKFKVLGNTDRHSIKKNLIGALLFDSGETAEATRLKRTARRRYTRRKNRICYLQEIFSNEMAKVDDSFFHRLEESFLVEEDKKHERHPIFGNIVDEVAYHEKYPTIYHLRKKLVDSTDKADLRLIYLALAHMIKFRGHFLIEGDLNPDNSDVDKLFIQLVQTYNQLFEENPINASGVDAKAILSARLSKSRRLENLIAQLPGEKKNGLFGNLIALSLGLTPNFKSNFDLAEDAKLQLSKDTYDDDLDNLLAQIGDQYADLFLAAKNLSDAILLSDILRVNTEITKAPLSASMIKRYDEHHQDLTLLKALVRQQLPEKYKEIFFDQSKNGYAGYIDGGASQEEFYKFIKPILEKMDGTEELLVKLNREDLLRKQRTFDNGSIPHQIHLGELHAILRRQEDFYPFLKDNREKIEKILTFRIPYYVGPLARGNSRFAWMTRKSEETITPWNFEEVVDKGASAQSFIERMTNFDKNLPNEKVLPKHSLLYEYFTVYNELTKVKYVTEGMRKPAFLSGEQKKAIVDLLFKTNRKVTVKQLKEDYFKKIECFDSVEISGVEDRFNASLGTYHDLLKIIKDKDFLDNEENEDILEDIVLTLTLFEDREMIEERLKTYAHLFDDKVMKQLKRRRYTGWGRLSRKLINGIRDKQSGKTILDFLKSDGFANRNFMQLIHDDSLTFKEDIQKAQVSGQGDSLHEHIANLAGSPAIKKGILQTVKVVDELVKVMGRHKPENIVIEMARENQTTQKGQKNSRERMKRIEEGIKELGSQILKEHPVENTQLQNEKLYLYYLQNGRDMYVDQELDINRLSDYDVDHIVPQSFLKDDSIDNKVLTRSDKARGKSDNVPSEEVVKKMKNYWRQLLNAKLITQRKFDNLTKAERGGLSELDKAGFIKRQLVETRQITKHVAQILDSRMNTKYDENDKLIREVKVITLKSKLVSDFRKDFQFYKVREINNYHHAHDAYLNAVVGTALIKKYPKLESEFVYGDYKVYDVRKMIAKSEQEIGKATAKYFFYSNIMNFFKTEITLANGEIRKRPLIETNGETGEIVWDKGRDFATVRKVLSMPQVNIVKKTEVQTGGFSKESILPKRNSDKLIARKKDWDPKKYGGFDSPTVAYSVLVVAKVEKGKSKKLKSVKELLGITIMERSSFEKNPIDFLEAKGYKEVKKDLIIKLPKYSLFELENGRKRMLASAGELQKGNELALPSKYVNFLYLASHYEKLKGSPEDNEQKQLFVEQHKHYLDEIIEQISEFSKRVILADANLDKVLSAYNKHRDKPIREQAENIIHLFTLTNLGAPAAFKYFDTTIDRKRYTSTKEVLDATLIHQSITGLYETRIDLSQLGGDGGPAPGSSEAAAKGGTLGDQGSRGSDPLPEPRVTLTVEGIPTEFLVNTGAEHSVLTKPMGKMGSKRTVVAGATGSKVYPWTTKRLLKIGQKQVTHSFLVIPECPAPLLGRDLLTKLKAQIQFSTEGPQVTWEDRPAMCLVLNLEEEYRLHEKPVPPSIDPSWLQLFPMVWAEKAGMGLANQVPPVVVELKSDASPVAVRQYPMSKEAREGIRPHIQRFLDLGILVPCQSPWNTPLLPVKKPGTNDYRPVQDLREVNKRVQDIHPTVPNPYNLLSSLPPSHTWYSVLDLKDAFFCLKLHPNSQPLFAFEWRDPEKGNTGQLTWTRLPQGFKNSPTLFDEALHRDLASFRALNPQVVMLQYVDDLLVAAPTYRDCKEGTRRLLQELSKLGYRVSAKKAQLCREEVTYLGYLLKGGKRWLTPARKATVMKIPTPTTPRQVREFLGTAGFCRLWIPGFASLAAPLYPLTREKVPFTWTEAHQEAFGRIKEALLSAPALALPDLTKPFALYVDEKEGVARGVLTQTLGPWRRPVAYLSKKLDPVASGWPTCLKAIAAVALLLKDADKLTLGQNVLVIAPHNLESIVRQPPDRWMTNARMTHYQSLLLNERVSFAPPAILNPATLLPVESDDTPIHICSEILAEETGTRPDLRDQPLPGVPAWYTDGSSFIMDGRRQAGAAIVDNKRTVWASNLPEGTSAQKAELIALTQALRLAEGKSINIYTDSRYAFATAHVHGAIYKQRGLLTSAGKDIKNKEEILALLEAIHLPKRVAIIHCPGHQRGTDPVATGNRKADEAAKQAAQSTRILTETTKNAGKRTADGSEFEKRTADGSEFESPKKKAKVE

SEQ ID NO: 7632 - protein, 2127 aa, synthetic construct
MPAAKRVKLDGGDKKYSIGLDIGTNSVGWAVITDEYKVPSKKFKVLGNTDRHSIKKNLIGALLFDSGETAEATRLKRTARRRYTRRKNRICYLQEIFSNEMAKVDDSFFHRLEESFLVEEDKKHERHPIFGNIVDEVAYHEKYPTIYHLRKKLVDSTDKADLRLIYLALAHMIKFRGHFLIEGDLNPDNSDVDKLFIQLVQTYNQLFEENPINASGVDAKAILSARLSKSRRLENLIAQLPGEKKNGLFGNLIALSLGLTPNFKSNFDLAEDAKLQLSKDTYDDDLDNLLAQIGDQYADLFLAAKNLSDAILLSDILRVNTEITKAPLSASMIKRYDEHHQDLTLLKALVRQQLPEKYKEIFFDQSKNGYAGYIDGGASQEEFYKFIKPILEKMDGTEELLVKLNREDLLRKQRTFDNGSIPHQIHLGELHAILRRQEDFYPFLKDNREKIEKILTFRIPYYVGPLARGNSRFAWMTRKSEETITPWNFEEVVDKGASAQSFIERMTNFDKNLPNEKVLPKHSLLYEYFTVYNELTKVKYVTEGMRKPAFLSGEQKKAIVDLLFKTNRKVTVKQLKEDYFKKIECFDSVEISGVEDRFNASLGTYHDLLKIIKDKDFLDNEENEDILEDIVLTLTLFEDREMIEERLKTYAHLFDDKVMKQLKRRRYTGWGRLSRKLINGIRDKQSGKTILDFLKSDGFANRNFMQLIHDDSLTFKEDIQKAQVSGQGDSLHEHIANLAGSPAIKKGILQTVKVVDELVKVMGRHKPENIVIEMARENQTTQKGQKNSRERMKRIEEGIKELGSQILKEHPVENTQLQNEKLYLYYLQNGRDMYVDQELDINRLSDYDVDHIVPQSFLKDDSIDNKVLTRSDKARGKSDNVPSEEVVKKMKNYWRQLLNAKLITQRKFDNLTKAERGGLSELDKAGFIKRQLVETRQITKHVAQILDSRMNTKYDENDKLIREVKVITLKSKLVSDFRKDFQFYKVREINNYHHAHDAYLNAVVGTALIKKYPKLESEFVYGDYKVYDVRKMIAKSEQEIGKATAKYFFYSNIMNFFKTEITLANGEIRKRPLIETNGETGEIVWDKGRDFATVRKVLSMPQVNIVKKTEVQTGGFSKESILPKRNSDKLIARKKDWDPKKYGGFDSPTVAYSVLVVAKVEKGKSKKLKSVKELLGITIMERSSFEKNPIDFLEAKGYKEVKKDLIIKLPKYSLFELENGRKRMLASAGELQKGNELALPSKYVNFLYLASHYEKLKGSPEDNEQKQLFVEQHKHYLDEIIEQISEFSKRVILADANLDKVLSAYNKHRDKPIREQAENIIHLFTLTNLGAPAAFKYFDTTIDRKRYTSTKEVLDATLIHQSITGLYETRIDLSQLGGDGGPAPGSSEAAAKGGLLGRDLLTKLKAQIQFSTEGPQVTWEDRPAMCLVLNLEEEYRLHEKPVPPSIDPSWLQLFPMVWAEKAGMGLANQVPPVVVELKSDASPVAVRQYPMSKEAREGIRPHIQRFLDLGILVPCQSPWNTPLLPVKKPGTNDYRPVQDLREVNKRVQDIHPTVPNPYNLLSSLPPSHTWYSVLDLKDAFFCLKLHPNSQPLFAFEWRDPEKGNTGQLTWTRLPQGFKNSPTLFNEALHRDLASFRALNPQVVMLQYVDDLLVAAPTYRDCKEGTRRLLQELSKLGYRVSAKKAQLCREEVTYLGYLLKGGKRWLTPARKATVMKIPTPTTPRQVREFLGTAGFCRLWIPGFASLAAPLYPLTRPKVPFTWTEAHQEAFGRIKEALLSAPALALPDLTKPFALYVDEKEGVARGVLTQTLGPWRRPVAYLSKKLDPVASGWPTCLKAIAAVALLLKDADKLTLGQNVLVIAPHNLESIVRQPPDRWMTNARMTHYQSLLLNERVSFAPPAILNPATLLPVESDDTPIHICSEILAEETGTRPDLRDQPLPGVPAWYTDGSSFIMDGRRQAGAAIVDNKRTVWASNLPEGTSAQKAELIALTQALRLAEGKSINIYTDSRYAFATAHVHGAIYKQRGWLTSAGKDIKNKEEILALLEAIHLPKRVAIIHCPGHQRGTDPVATGNRKADEAAKQAAQSTRILTETTKNAGKRTADGSEFEKRTADGSEFESPKKKAKVE

SEQ ID NO: 7633 - protein, 2127 aa, synthetic construct
MPAAKRVKLDGGDKKYSIGLDIGTNSVGWAVITDEYKVPSKKFKVLGNTDRHSIKKNLIGALLFDSGETAEATRLKRTARRRYTRRKNRICYLQEIFSNEMAKVDDSFFHRLEESFLVEEDKKHERHPIFGNIVDEVAYHEKYPTIYHLRKKLVDSTDKADLRLIYLALAHMIKFRGHFLIEGDLNPDNSDVDKLFIQLVQTYNQLFEENPINASGVDAKAILSARLSKSRRLENLIAQLPGEKKNGLFGNLIALSLGLTPNFKSNFDLAEDAKLQLSKDTYDDDLDNLLAQIGDQYADLFLAAKNLSDAILLSDILRVNTEITKAPLSASMIKRYDEHHQDLTLLKALVRQQLPEKYKEIFFDQSKNGYAGYIDGGASQEEFYKFIKPILEKMDGTEELLVKLNREDLLRKQRTFDNGSIPHQIHLGELHAILRRQEDFYPFLKDNREKIEKILTFRIPYYVGPLARGNSRFAWMTRKSEETITPWNFEEVVDKGASAQSFIERMTNFDKNLPNEKVLPKHSLLYEYFTVYNELTKVKYVTEGMRKPAFLSGEQKKAIVDLLFKTNRKVTVKQLKEDYFKKIECFDSVEISGVEDRFNASLGTYHDLLKIIKDKDFLDNEENEDILEDIVLTLTLFEDREMIEERLKTYAHLFDDKVMKQLKRRRYTGWGRLSRKLINGIRDKQSGKTILDFLKSDGFANRNFMQLIHDDSLTFKEDIQKAQVSGQGDSLHEHIANLAGSPAIKKGILQTVKVVDELVKVMGRHKPENIVIEMARENQTTQKGQKNSRERMKRIEEGIKELGSQILKEHPVENTQLQNEKLYLYYLQNGRDMYVDQELDINRLSDYDVDHIVPQSFLKDDSIDNKVLTRSDKARGKSDNVPSEEVVKKMKNYWRQLLNAKLITQRKFDNLTKAERGGLSELDKAGFIKRQLVETRQITKHVAQILDSRMNTKYDENDKLIREVKVITLKSKLVSDFRKDFQFYKVREINNYHHAHDAYLNAVVGTALIKKYPKLESEFVYGDYKVYDVRKMIAKSEQEIGKATAKYFFYSNIMNFFKTEITLANGEIRKRPLIETNGETGEIVWDKGRDFATVRKVLSMPQVNIVKKTEVQTGGFSKESILPKRNSDKLIARKKDWDPKKYGGFDSPTVAYSVLVVAKVEKGKSKKLKSVKELLGITIMERSSFEKNPIDFLEAKGYKEVKKDLIIKLPKYSLFELENGRKRMLASAGELQKGNELALPSKYVNFLYLASHYEKLKGSPEDNEQKQLFVEQHKHYLDEIIEQISEFSKRVILADANLDKVLSAYNKHRDKPIREQAENIIHLFTLTNLGAPAAFKYFDTTIDRKRYTSTKEVLDATLIHQSITGLYETRIDLSQLGGDGGPAPGSSEAAAKGGLLGRDLLTKLKAQIQFSTEGPQVTWEDRPAMCLVLNLEEEYRLHEKPVPPSIDPSWLQLFPMVWAEKAGMGLANQVPPVVVELKSDASPVAVRQYPMSKEAREGIRPHIQRFLDLGILVPCQSPWNTPLLPVKKPGTNDYRPVQDLREVNKRVQDIHPTVPNPYNLLSSLPPSHTWYSVLDLKDAFFCLKLHPNSQPLFAFEWRDPEKGNTGQLTWTRLPQGFKNSPTLFNEALHRDLASFRALNPQVVMLQYVDDLLVAAPTYRDCKEGTRRLLQELSKLGYRVSAKKAQLCREEVTYLGYLLKGGKRWLTPARKATVMKIPTPTTPRQVREFLGKAGFCRLFIPGFASLAAPLYPLTRPKVPFTWTEAHQEAFGRIKEALLSAPALALPDLTKPFALYVDEKEGVARGVLTQTLGPWRRPVAYLSKKLDPVASGWPTCLKAIAAVALLLKDADKLTLGQNVLVIAPHNLESIVRQPPDRWMTNARMTHYQSLLLNERVSFAPPAILNPATLLPVESDDTPIHICSEILAEETGTRPDLRDQPLPGVPAWYTDGSSFIMDGRRQAGAAIVDNKRTVWASNLPEGTSAQKAELIALTQALRLAEGKSINIYTDSRYAFATAHVHGAIYKQRGWLTSAGKDIKNKEEILALLEAIHLPKRVAIIHCPGHQRGTDPVATGNRKADEAAKQAAQSTRILTETTKNAGKRTADGSEFEKRTADGSEFESPKKKAKVE

SEQ ID NO: 7634 - protein, 2218 aa, synthetic construct
MPAAKRVKLDGGDKKYSIGLDIGTNSVGWAVITDEYKVPSKKFKVLGNTDRHSIKKNLIGALLFDSGETAEATRLKRTARRRYTRRKNRICYLQEIFSNEMAKVDDSFFHRLEESFLVEEDKKHERHPIFGNIVDEVAYHEKYPTIYHLRKKLVDSTDKADLRLIYLALAHMIKFRGHFLIEGDLNPDNSDVDKLFIQLVQTYNQLFEENPINASGVDAKAILSARLSKSRRLENLIAQLPGEKKNGLFGNLIALSLGLTPNFKSNFDLAEDAKLQLSKDTYDDDLDNLLAQIGDQYADLFLAAKNLSDAILLSDILRVNTEITKAPLSASMIKRYDEHHQDLTLLKALVRQQLPEKYKEIFFDQSKNGYAGYIDGGASQEEFYKFIKPILEKMDGTEELLVKLNREDLLRKQRTFDNGSIPHQIHLGELHAILRRQEDFYPFLKDNREKIEKILTFRIPYYVGPLARGNSRFAWMTRKSEETITPWNFEEVVDKGASAQSFIERMTNFDKNLPNEKVLPKHSLLYEYFTVYNELTKVKYVTEGMRKPAFLSGEQKKAIVDLLFKTNRKVTVKQLKEDYFKKIECFDSVEISGVEDRFNASLGTYHDLLKIIKDKDFLDNEENEDILEDIVLTLTLFEDREMIEERLKTYAHLFDDKVMKQLKRRRYTGWGRLSRKLINGIRDKQSGKTILDFLKSDGFANRNFMQLIHDDSLTFKEDIQKAQVSGQGDSLHEHIANLAGSPAIKKGILQTVKVVDELVKVMGRHKPENIVIEMARENQTTQKGQKNSRERMKRIEEGIKELGSQILKEHPVENTQLQNEKLYLYYLQNGRDMYVDQELDINRLSDYDVDHIVPQSFLKDDSIDNKVLTRSDKARGKSDNVPSEEVVKKMKNYWRQLLNAKLITQRKFDNLTKAERGGLSELDKAGFIKRQLVETRQITKHVAQILDSRMNTKYDENDKLIREVKVITLKSKLVSDFRKDFQFYKVREINNYHHAHDAYLNAVVGTALIKKYPKLESEFVYGDYKVYDVRKMIAKSEQEIGKATAKYFFYSNIMNFFKTEITLANGEIRKRPLIETNGETGEIVWDKGRDFATVRKVLSMPQVNIVKKTEVQTGGFSKESILPKRNSDKLIARKKDWDPKKYGGFDSPTVAYSVLVVAKVEKGKSKKLKSVKELLGITIMERSSFEKNPIDFLEAKGYKEVKKDLIIKLPKYSLFELENGRKRMLASAGELQKGNELALPSKYVNFLYLASHYEKLKGSPEDNEQKQLFVEQHKHYLDEIIEQISEFSKRVILADANLDKVLSAYNKHRDKPIREQAENIIHLFTLTNLGAPAAFKYFDTTIDRKRYTSTKEVLDATLIHQSITGLYETRIDLSQLGGDGGPAPGSSEAAAKGGTLGDQGSRGSDPLPEPRVTLTVEGIPTEFLVNTGAEHSVLTKPMGKMGSKRTVVAGATGSKVYPWTTKRLLKIGQKQVTHSFLVIPECPAPLLGRDLLTKLKAQIQFSTEGPQVTWEDRPAMCLVLNLEEEYRLHEKPVPPSIDPSWLQLFPMVWAEKAGMGLANQVPPVVVELKSDASPVAVRQYPMSKEAREGIRPHIQRFLDLGILVPCQSPWNTPLLPVKKPGTNDYRPVQDLREVNKRVQDIHPTVPNPYNLLSSLPPSHTWYSVLDLKDAFFCLKLHPNSQPLFAFEWRDPEKGNTGQLTWTRLPQGFKNSPTLFNEALHRDLASFRALNPQVVMLQYVDDLLVAAPTYRDCKEGTRRLLQELSKLGYRVSAKKAQLCREEVTYLGYLLKGGKRWLTPARKATVMKIPTPTTPRQVREFLGTAGFCRLWIPGFASLAAPLYPLTRPKVPFTWTEAHQEAFGRIKEALLSAPALALPDLTKPFALYVDEKEGVARGVLTQTLGPWRRPVAYLSKKLDPVASGWPTCLKAIAAVALLLKDADKLTLGQNVLVIAPHNLESIVRQPPDRWMTNARMTHYQSLLLNERVSFAPPAILNPATLLPVESDDTPIHICSEILAEETGTRPDLRDQPLPGVPAWYTDGSSFIMDGRRQAGAAIVDNKRTVWASNLPEGTSAQKAELIALTQALRLAEGKSINIYTDSRYAFATAHVHGAIYKQRGWLTSAGKDIKNKEEILALLEAIHLPKRVAIIHCPGHQRGTDPVATGNRKADEAAKQAAQSTRILTETTKNAGKRTADGSEFEKRTADGSEFESPKKKAKVE

SEQ ID NO: 7635 - protein, 2218 aa, synthetic construct
MPAAKRVKLDGGDKKYSIGLDIGTNSVGWAVITDEYKVPSKKFKVLGNTDRHSIKKNLIGALLFDSGETAEATRLKRTARRRYTRRKNRICYLQEIFSNEMAKVDDSFFHRLEESFLVEEDKKHERHPIFGNIVDEVAYHEKYPTIYHLRKKLVDSTDKADLRLIYLALAHMIKFRGHFLIEGDLNPDNSDVDKLFIQLVQTYNQLFEENPINASGVDAKAILSARLSKSRRLENLIAQLPGEKKNGLFGNLIALSLGLTPNFKSNFDLAEDAKLQLSKDTYDDDLDNLLAQIGDQYADLFLAAKNLSDAILLSDILRVNTEITKAPLSASMIKRYDEHHQDLTLLKALVRQQLPEKYKEIFFDQSKNGYAGYIDGGASQEEFYKFIKPILEKMDGTEELLVKLNREDLLRKQRTFDNGSIPHQIHLGELHAILRRQEDFYPFLKDNREKIEKILTFRIPYYVGPLARGNSRFAWMTRKSEETITPWNFEEVVDKGASAQSFIERMTNFDKNLPNEKVLPKHSLLYEYFTVYNELTKVKYVTEGMRKPAFLSGEQKKAIVDLLFKTNRKVTVKQLKEDYFKKIECFDSVEISGVEDRFNASLGTYHDLLKIIKDKDFLDNEENEDILEDIVLTLTLFEDREMIEERLKTYAHLFDDKVMKQLKRRRYTGWGRLSRKLINGIRDKQSGKTILDFLKSDGFANRNFMQLIHDDSLTFKEDIQKAQVSGQGDSLHEHIANLAGSPAIKKGILQTVKVVDELVKVMGRHKPENIVIEMARENQTTQKGQKNSRERMKRIEEGIKELGSQILKEHPVENTQLQNEKLYLYYLQNGRDMYVDQELDINRLSDYDVDHIVPQSFLKDDSIDNKVLTRSDKARGKSDNVPSEEVVKKMKNYWRQLLNAKLITQRKFDNLTKAERGGLSELDKAGFIKRQLVETRQITKHVAQILDSRMNTKYDENDKLIREVKVITLKSKLVSDFRKDFQFYKVREINNYHHAHDAYLNAVVGTALIKKYPKLESEFVYGDYKVYDVRKMIAKSEQEIGKATAKYFFYSNIMNFFKTEITLANGEIRKRPLIETNGETGEIVWDKGRDFATVRKVLSMPQVNIVKKTEVQTGGFSKESILPKRNSDKLIARKKDWDPKKYGGFDSPTVAYSVLVVAKVEKGKSKKLKSVKELLGITIMERSSFEKNPIDFLEAKGYKEVKKDLIIKLPKYSLFELENGRKRMLASAGELQKGNELALPSKYVNFLYLASHYEKLKGSPEDNEQKQLFVEQHKHYLDEIIEQISEFSKRVILADANLDKVLSAYNKHRDKPIREQAENIIHLFTLTNLGAPAAFKYFDTTIDRKRYTSTKEVLDATLIHQSITGLYETRIDLSQLGGDGGPAPGSSEAAAKGGTLGDQGSRGSDPLPEPRVTLTVEGIPTEFLVNTGAEHSVLTKPMGKMGSKRTVVAGATGSKVYPWTTKRLLKIGQKQVTHSFLVIPECPAPLLGRDLLTKLKAQIQFSTEGPQVTWEDRPAMCLVLNLEEEYRLHEKPVPPSIDPSWLQLFPMVWAEKAGMGLANQVPPVVVELKSDASPVAVRQYPMSKEAREGIRPHIQRFLDLGILVPCQSPWNTPLLPVKKPGTNDYRPVQDLREVNKRVQDIHPTVPNPYNLLSSLPPSHTWYSVLDLKDAFFCLKLHPNSQPLFAFEWRDPEKGNTGQLTWTRLPQGFKNSPTLFNEALHRDLASFRALNPQVVMLQYVDDLLVAAPTYRDCKEGTRRLLQELSKLGYRVSAKKAQLCREEVTYLGYLLKGGKRWLTPARKATVMKIPTPTTPRQVREFLGKAGFCRLFIPGFASLAAPLYPLTRPKVPFTWTEAHQEAFGRIKEALLSAPALALPDLTKPFALYVDEKEGVARGVLTQTLGPWRRPVAYLSKKLDPVASGWPTCLKAIAAVALLLKDADKLTLGQNVLVIAPHNLESIVRQPPDRWMTNARMTHYQSLLLNERVSFAPPAILNPATLLPVESDDTPIHICSEILAEETGTRPDLRDQPLPGVPAWYTDGSSFIMDGRRQAGAAIVDNKRTVWASNLPEGTSAQKAELIALTQALRLAEGKSINIYTDSRYAFATAHVHGAIYKQRGWLTSAGKDIKNKEEILALLEAIHLPKRVAIIHCPGHQRGTDPVATGNRKADEAAKQAAQSTRILTETTKNAGKRTADGSEFEKRTADGSEFESPKKKAKVE

SEQ ID NO: 7636 - protein, 2096 aa, synthetic construct
MPAAKRVKLDGGDKKYSIGLDIGTNSVGWAVITDEYKVPSKKFKVLGNTDRHSIKKNLIGALLFDSGETAEATRLKRTARRRYTRRKNRICYLQEIFSNEMAKVDDSFFHRLEESFLVEEDKKHERHPIFGNIVDEVAYHEKYPTIYHLRKKLVDSTDKADLRLIYLALAHMIKFRGHFLIEGDLNPDNSDVDKLFIQLVQTYNQLFEENPINASGVDAKAILSARLSKSRRLENLIAQLPGEKKNGLFGNLIALSLGLTPNFKSNFDLAEDAKLQLSKDTYDDDLDNLLAQIGDQYADLFLAAKNLSDAILLSDILRVNTEITKAPLSASMIKRYDEHHQDLTLLKALVRQQLPEKYKEIFFDQSKNGYAGYIDGGASQEEFYKFIKPILEKMDGTEELLVKLNREDLLRKQRTFDNGSIPHQIHLGELHAILRRQEDFYPFLKDNREKIEKILTFRIPYYVGPLARGNSRFAWMTRKSEETITPWNFEEVVDKGASAQSFIERMTNFDKNLPNEKVLPKHSLLYEYFTVYNELTKVKYVTEGMRKPAFLSGEQKKAIVDLLFKTNRKVTVKQLKEDYFKKIECFDSVEISGVEDRFNASLGTYHDLLKIIKDKDFLDNEENEDILEDIVLTLTLFEDREMIEERLKTYAHLFDDKVMKQLKRRRYTGWGRLSRKLINGIRDKQSGKTILDFLKSDGFANRNFMQLIHDDSLTFKEDIQKAQVSGQGDSLHEHIANLAGSPAIKKGILQTVKVVDELVKVMGRHKPENIVIEMARENQTTQKGQKNSRERMKRIEEGIKELGSQILKEHPVENTQLQNEKLYLYYLQNGRDMYVDQELDINRLSDYDVDHIVPQSFLKDDSIDNKVLTRSDKARGKSDNVPSEEVVKKMKNYWRQLLNAKLITQRKFDNLTKAERGGLSELDKAGFIKRQLVETRQITKHVAQILDSRMNTKYDENDKLIREVKVITLKSKLVSDFRKDFQFYKVREINNYHHAHDAYLNAVVGTALIKKYPKLESEFVYGDYKVYDVRKMIAKSEQEIGKATAKYFFYSNIMNFFKTEITLANGEIRKRPLIETNGETGEIVWDKGRDFATVRKVLSMPQVNIVKKTEVQTGGFSKESILPKRNSDKLIARKKDWDPKKYGGFDSPTVAYSVLVVAKVEKGKSKKLKSVKELLGITIMERSSFEKNPIDFLEAKGYKEVKKDLIIKLPKYSLFELENGRKRMLASAGELQKGNELALPSKYVNFLYLASHYEKLKGSPEDNEQKQLFVEQHKHYLDEIIEQISEFSKRVILADANLDKVLSAYNKHRDKPIREQAENIIHLFTLTNLGAPAAFKYFDTTIDRKRYTSTKEVLDATLIHQSITGLYETRIDLSQLGGDGGPAPGSSEAAAKGGTLGIEDEYRLHETSTEPDVSLGSTWLSDFPQAWAETGGMGLAVRQAPLIIPLKATSTPVSIQQYPMSHEARLGIKPHIQRLLDQGILVPCQSPWNTPLLPVKKPGTNDYRPVQDLREVNKRVEDIHPTVPNPYNLLSGLPPSHQWYTVLDLKDAFFCLRLHPTSQPLFAFEWRDPGMGISGQLTWTRLPQGFKNSPTLFNEALHRDLADFRIQHPDLILLQYVDDILLAATSELDCQQGTRALLQTLGDLGYRASAKKAQICQKQVKYLGYLLREGQRWLTEARKETVMGQPVPKTPRQLREFLGTAGFCRLWIPGFAEMAAPLYPLTKPGTLFSWGPDQQKAYQEIKQALLTAPALGLPDLTKPFELFVDEKQGYAKGVLTQKLGPWRRPVAYLSKKLDPVAAGWPPCLRMVAAIAVLTKDAGKLTMGQPLVILAPHAVEALVKQPPDRWLSNARMTHYQAMLLDTDRVQFGPVVALNPATLLPLPEEGAPHDCLEILAETHGTRPDLTDQPIPDADHTWYTDGSSFLQEGQRKAGAAVTTETEVIWAGALPAGTSAQRAELIALTQALKMAEGKRLNVYTDSRYAFATAHIHGEIYRRRGWLTSEGREIKNKSEILALLKALFLPKRLSIIHCLGHQKGDSAEARGNRLADQAAREAAIKTPPDTSTLLAGKRTADGSEFEKRTADGSEFESPKKKAKVE

SEQ ID NO: 7637 - protein, 2096 aa, synthetic construct
MPAAKRVKLDGGDKKYSIGLDIGTNSVGWAVITDEYKVPSKKFKVLGNTDRHSIKKNLIGALLFDSGETAEATRLKRTARRRYTRRKNRICYLQEIFSNEMAKVDDSFFHRLEESFLVEEDKKHERHPIFGNIVDEVAYHEKYPTIYHLRKKLVDSTDKADLRLIYLALAHMIKFRGHFLIEGDLNPDNSDVDKLFIQLVQTYNQLFEENPINASGVDAKAILSARLSKSRRLENLIAQLPGEKKNGLFGNLIALSLGLTPNFKSNFDLAEDAKLQLSKDTYDDDLDNLLAQIGDQYADLFLAAKNLSDAILLSDILRVNTEITKAPLSASMIKRYDEHHQDLTLLKALVRQQLPEKYKEIFFDQSKNGYAGYIDGGASQEEFYKFIKPILEKMDGTEELLVKLNREDLLRKQRTFDNGSIPHQIHLGELHAILRRQEDFYPFLKDNREKIEKILTFRIPYYVGPLARGNSRFAWMTRKSEETITPWNFEEVVDKGASAQSFIERMTNFDKNLPNEKVLPKHSLLYEYFTVYNELTKVKYVTEGMRKPAFLSGEQKKAIVDLLFKTNRKVTVKQLKEDYFKKIECFDSVEISGVEDRFNASLGTYHDLLKIIKDKDFLDNEENEDILEDIVLTLTLFEDREMIEERLKTYAHLFDDKVMKQLKRRRYTGWGRLSRKLINGIRDKQSGKTILDFLKSDGFANRNFMQLIHDDSLTFKEDIQKAQVSGQGDSLHEHIANLAGSPAIKKGILQTVKVVDELVKVMGRHKPENIVIEMARENQTTQKGQKNSRERMKRIEEGIKELGSQILKEHPVENTQLQNEKLYLYYLQNGRDMYVDQELDINRLSDYDVDHIVPQSFLKDDSIDNKVLTRSDKARGKSDNVPSEEVVKKMKNYWRQLLNAKLITQRKFDNLTKAERGGLSELDKAGFIKRQLVETRQITKHVAQILDSRMNTKYDENDKLIREVKVITLKSKLVSDFRKDFQFYKVREINNYHHAHDAYLNAVVGTALIKKYPKLESEFVYGDYKVYDVRKMIAKSEQEIGKATAKYFFYSNIMNFFKTEITLANGEIRKRPLIETNGETGEIVWDKGRDFATVRKVLSMPQVNIVKKTEVQTGGFSKESILPKRNSDKLIARKKDWDPKKYGGFDSPTVAYSVLVVAKVEKGKSKKLKSVKELLGITIMERSSFEKNPIDFLEAKGYKEVKKDLIIKLPKYSLFELENGRKRMLASAGELQKGNELALPSKYVNFLYLASHYEKLKGSPEDNEQKQLFVEQHKHYLDEIIEQISEFSKRVILADANLDKVLSAYNKHRDKPIREQAENIIHLFTLTNLGAPAAFKYFDTTIDRKRYTSTKEVLDATLIHQSITGLYETRIDLSQLGGDGGPAPGSSEAAAKGGTLNIEDEYRLHETSKEPDVSLGSTWLSDFPQAWAETGGMGLAVRQAPLIIPLKATSTPVSIKQYPMSQEARLGIKPHIQRLLDQGILVPCQSPWNTPLLPVKKPGTNDYRPVQDLREVNKRVEDIHPTVPNPYNLLSGLPPSHQWYTVLDLKDAFFCLRLHPTSQPLFAFEWRDPEMGISGQLTWTRLPQGFKNSPTLFDEALHRDLAGFRIQHPDLILLQYVDDLLLAATSELDCQQGTRALLQTLGDLGYRASAKKAQICQKQVKYLGYLLKEGQRWLTEARKETVMGQPIPKTPRQLREFLGTAGFCRLWIPGFAEMAAPLYPLTKTGTLFNWGPDQQKAFQEIKQALLTAPALGLPDLTKPFELFVDEKQGYAKGVLTQKLGPWRRPVAYLSKKLDPVAAGWPPCLRMVAAIAVLTKDAGKLTMGQPLVILAPHAVEALVKQPPDRWLSNARMTHYQALLLDTDRVQFGPVVALNPATLLPLPEEGLQHDCLDILAEAHGTRSDLMDQPLPDADHTWYTDGSSFLQEGQRKAGAAVTTETEVIWARALPAGTSAQRAELIALTQALKMAEGKKLNVYTDSRYAFATAHIHGEIYRRRGLLTSEGKEIKNKDEILALLKALFLPKRLSIIHCPGHQKGNSAEARGNRMADQAAREVATRETPETSTLLAGKRTADGSEFEKRTADGSEFESPKKKAKVE

SEQ ID NO: 7638 - protein, 2096 aa, synthetic construct
MPAAKRVKLDGGDKKYSIGLDIGTNSVGWAVITDEYKVPSKKFKVLGNTDRHSIKKNLIGALLFDSGETAEATRLKRTARRRYTRRKNRICYLQEIFSNEMAKVDDSFFHRLEESFLVEEDKKHERHPIFGNIVDEVAYHEKYPTIYHLRKKLVDSTDKADLRLIYLALAHMIKFRGHFLIEGDLNPDNSDVDKLFIQLVQTYNQLFEENPINASGVDAKAILSARLSKSRRLENLIAQLPGEKKNGLFGNLIALSLGLTPNFKSNFDLAEDAKLQLSKDTYDDDLDNLLAQIGDQYADLFLAAKNLSDAILLSDILRVNTEITKAPLSASMIKRYDEHHQDLTLLKALVRQQLPEKYKEIFFDQSKNGYAGYIDGGASQEEFYKFIKPILEKMDGTEELLVKLNREDLLRKQRTFDNGSIPHQIHLGELHAILRRQEDFYPFLKDNREKIEKILTFRIPYYVGPLARGNSRFAWMTRKSEETITPWNFEEVVDKGASAQSFIERMTNFDKNLPNEKVLPKHSLLYEYFTVYNELTKVKYVTEGMRKPAFLSGEQKKAIVDLLFKTNRKVTVKQLKEDYFKKIECFDSVEISGVEDRFNASLGTYHDLLKIIKDKDFLDNEENEDILEDIVLTLTLFEDREMIEERLKTYAHLFDDKVMKQLKRRRYTGWGRLSRKLINGIRDKQSGKTILDFLKSDGFANRNFMQLIHDDSLTFKEDIQKAQVSGQGDSLHEHIANLAGSPAIKKGILQTVKVVDELVKVMGRHKPENIVIEMARENQTTQKGQKNSRERMKRIEEGIKELGSQILKEHPVENTQLQNEKLYLYYLQNGRDMYVDQELDINRLSDYDVDHIVPQSFLKDDSIDNKVLTRSDKARGKSDNVPSEEVVKKMKNYWRQLLNAKLITQRKFDNLTKAERGGLSELDKAGFIKRQLVETRQITKHVAQILDSRMNTKYDENDKLIREVKVITLKSKLVSDFRKDFQFYKVREINNYHHAHDAYLNAVVGTALIKKYPKLESEFVYGDYKVYDVRKMIAKSEQEIGKATAKYFFYSNIMNFFKTEITLANGEIRKRPLIETNGETGEIVWDKGRDFATVRKVLSMPQVNIVKKTEVQTGGFSKESILPKRNSDKLIARKKDWDPKKYGGFDSPTVAYSVLVVAKVEKGKSKKLKSVKELLGITIMERSSFEKNPIDFLEAKGYKEVKKDLIIKLPKYSLFELENGRKRMLASAGELQKGNELALPSKYVNFLYLASHYEKLKGSPEDNEQKQLFVEQHKHYLDEIIEQISEFSKRVILADANLDKVLSAYNKHRDKPIREQAENIIHLFTLTNLGAPAAFKYFDTTIDRKRYTSTKEVLDATLIHQSITGLYETRIDLSQLGGDGGPAPGSSEAAAKGGTLNIEDEHRLHETSKEPDVSLGSTWLSDFPQAWAETGGMGLAVRQAPLIIPLKATSTPVSIKQYPMSQEARLGIKPHIQRLLDQGILVPCQSPWNTPLLPVKKPGTNDYRPVQDLREVNKRVEDIHPTVPNPYNLLSGLPPSHQWYTVLDLKDAFFCLRLHPTSQPLFAFEWRDPEMGISGQLTWTRLPQGFKNSPTLFDEALHRDLADFRIQHPDLILLQYVDDLLLAATSELDCQQGTRALLQTLGNLGYRASAKKAQICQKQVKYLGYLLKEGQRWLTEARKETVMGQPTPKTPRQLREFLGTAGFCRLWIPGFAEMAAPLYPLTKTGTLFNWGPDQQKAYQEIKQALLTAPALGLPDLTKPFELFVDEKQGYAKGVLTQKLGPWRRPVAYLSKKLDPVAAGWPPCLRMVAAIAVLTKDAGKLTMGQPLVILAPHAVEALVKQPPDRWLSNARMTHYQALLLDTDRVQFGPVVALNPATLLPLPEEGLQHNCLDILAEAHGTRPDLTDQPLPDADHTWYTDGSSLLQEGQRKAGAAVTTETEVIWAKALPAGTSAQRAELIALTQALKMAEGKKLNVYTDSRYAFATAHIHGEIYRRRGLLTSEGKEIKNKDEILALLKALFLPKRLSIIHCPGHQKGHSAEARGNRMADQAARKAAITETPDTSTLLAGKRTADGSEFEKRTADGSEFESPKKKAKVE

SEQ ID NO: 7639 - protein, 2096 aa, synthetic construct
MPAAKRVKLDGGDKKYSIGLDIGTNSVGWAVITDEYKVPSKKFKVLGNTDRHSIKKNLIGALLFDSGETAEATRLKRTARRRYTRRKNRICYLQEIFSNEMAKVDDSFFHRLEESFLVEEDKKHERHPIFGNIVDEVAYHEKYPTIYHLRKKLVDSTDKADLRLIYLALAHMIKFRGHFLIEGDLNPDNSDVDKLFIQLVQTYNQLFEENPINASGVDAKAILSARLSKSRRLENLIAQLPGEKKNGLFGNLIALSLGLTPNFKSNFDLAEDAKLQLSKDTYDDDLDNLLAQIGDQYADLFLAAKNLSDAILLSDILRVNTEITKAPLSASMIKRYDEHHQDLTLLKALVRQQLPEKYKEIFFDQSKNGYAGYIDGGASQEEFYKFIKPILEKMDGTEELLVKLNREDLLRKQRTFDNGSIPHQIHLGELHAILRRQEDFYPFLKDNREKIEKILTFRIPYYVGPLARGNSRFAWMTRKSEETITPWNFEEVVDKGASAQSFIERMTNFDKNLPNEKVLPKHSLLYEYFTVYNELTKVKYVTEGMRKPAFLSGEQKKAIVDLLFKTNRKVTVKQLKEDYFKKIECFDSVEISGVEDRFNASLGTYHDLLKIIKDKDFLDNEENEDILEDIVLTLTLFEDREMIEERLKTYAHLFDDKVMKQLKRRRYTGWGRLSRKLINGIRDKQSGKTILDFLKSDGFANRNFMQLIHDDSLTFKEDIQKAQVSGQGDSLHEHIANLAGSPAIKKGILQTVKVVDELVKVMGRHKPENIVIEMARENQTTQKGQKNSRERMKRIEEGIKELGSQILKEHPVENTQLQNEKLYLYYLQNGRDMYVDQELDINRLSDYDVDHIVPQSFLKDDSIDNKVLTRSDKARGKSDNVPSEEVVKKMKNYWRQLLNAKLITQRKFDNLTKAERGGLSELDKAGFIKRQLVETRQITKHVAQILDSRMNTKYDENDKLIREVKVITLKSKLVSDFRKDFQFYKVREINNYHHAHDAYLNAVVGTALIKKYPKLESEFVYGDYKVYDVRKMIAKSEQEIGKATAKYFFYSNIMNFFKTEITLANGEIRKRPLIETNGETGEIVWDKGRDFATVRKVLSMPQVNIVKKTEVQTGGFSKESILPKRNSDKLIARKKDWDPKKYGGFDSPTVAYSVLVVAKVEKGKSKKLKSVKELLGITIMERSSFEKNPIDFLEAKGYKEVKKDLIIKLPKYSLFELENGRKRMLASAGELQKGNELALPSKYVNFLYLASHYEKLKGSPEDNEQKQLFVEQHKHYLDEIIEQISEFSKRVILADANLDKVLSAYNKHRDKPIREQAENIIHLFTLTNLGAPAAFKYFDTTIDRKRYTSTKEVLDATLIHQSITGLYETRIDLSQLGGDGGPAPGSSEAAAKGGTLNIEDEYRLHETSKEPDVPLGSTWLSDFPQAWAETGGMGLAVRQAPLIIPLKATSTPVSIKQYPMSQEARLGIKPHIQRLLDQGILVPCQSPWNTPLLPVKKPGTNDYRPVQDLREVNKRVEDIHPTVPNPYNLLSGLPPSHQWYTVLDLKDAFFCLRLHPTSQPLFAFEWRDPEMGISGQLTWTRLPQGFKNSPTLFNEALHRDLADFRIQHPDLILLQYVDDLLLAATSEQDCQRGTRALLQTLGNLGYRASAKKAQICQKQVKYLGYLLKEGQRWLTEARKETVMGQPTPKTPRQLREFLGKAGFCRLFIPGFAEMAAPLYPLTKPGTLFNWGPDQQKAYQEIKQALLTAPALGLPDLTKPFELFVDEKQGYAKGVLTQKLGPWRRPVAYLSKKLDPVAAGWPPCLRMVAAIAVLTKDAGKLTMGQPLVILAPHAVEALVKQPPDRWLSNARMTHYQAMLLDTDRVQFGPVVALNPATLLPLPEKEAPHDCLEILAETHGTRPDLTDQPIPDADYTWYTDGSSFLQEGQRRAGAAVTTETEVIWARALPAGTSAQRAELIALTQALKMAEGKKLNVYTDSRYAFATAHVHGEIYRRRGWLTSEGREIKNKNEILALLKALFLPKRLSIIHCPGHQKGNSAEARGNRMADQAAREAAMKAVLETSTLLAGKRTADGSEFEKRTADGSEFESPKKKAKVE

SEQ ID NO: 7640 - protein, 2102 aa, synthetic construct
MPAAKRVKLDGGDKKYSIGLDIGTNSVGWAVITDEYKVPSKKFKVLGNTDRHSIKKNLIGALLFDSGETAEATRLKRTARRRYTRRKNRICYLQEIFSNEMAKVDDSFFHRLEESFLVEEDKKHERHPIFGNIVDEVAYHEKYPTIYHLRKKLVDSTDKADLRLIYLALAHMIKFRGHFLIEGDLNPDNSDVDKLFIQLVQTYNQLFEENPINASGVDAKAILSARLSKSRRLENLIAQLPGEKKNGLFGNLIALSLGLTPNFKSNFDLAEDAKLQLSKDTYDDDLDNLLAQIGDQYADLFLAAKNLSDAILLSDILRVNTEITKAPLSASMIKRYDEHHQDLTLLKALVRQQLPEKYKEIFFDQSKNGYAGYIDGGASQEEFYKFIKPILEKMDGTEELLVKLNREDLLRKQRTFDNGSIPHQIHLGELHAILRRQEDFYPFLKDNREKIEKILTFRIPYYVGPLARGNSRFAWMTRKSEETITPWNFEEVVDKGASAQSFIERMTNFDKNLPNEKVLPKHSLLYEYFTVYNELTKVKYVTEGMRKPAFLSGEQKKAIVDLLFKTNRKVTVKQLKEDYFKKIECFDSVEISGVEDRFNASLGTYHDLLKIIKDKDFLDNEENEDILEDIVLTLTLFEDREMIEERLKTYAHLFDDKVMKQLKRRRYTGWGRLSRKLINGIRDKQSGKTILDFLKSDGFANRNFMQLIHDDSLTFKEDIQKAQVSGQGDSLHEHIANLAGSPAIKKGILQTVKVVDELVKVMGRHKPENIVIEMARENQTTQKGQKNSRERMKRIEEGIKELGSQILKEHPVENTQLQNEKLYLYYLQNGRDMYVDQELDINRLSDYDVDHIVPQSFLKDDSIDNKVLTRSDKARGKSDNVPSEEVVKKMKNYWRQLLNAKLITQRKFDNLTKAERGGLSELDKAGFIKRQLVETRQITKHVAQILDSRMNTKYDENDKLIREVKVITLKSKLVSDFRKDFQFYKVREINNYHHAHDAYLNAVVGTALIKKYPKLESEFVYGDYKVYDVRKMIAKSEQEIGKATAKYFFYSNIMNFFKTEITLANGEIRKRPLIETNGETGEIVWDKGRDFATVRKVLSMPQVNIVKKTEVQTGGFSKESILPKRNSDKLIARKKDWDPKKYGGFDSPTVAYSVLVVAKVEKGKSKKLKSVKELLGITIMERSSFEKNPIDFLEAKGYKEVKKDLIIKLPKYSLFELENGRKRMLASAGELQKGNELALPSKYVNFLYLASHYEKLKGSPEDNEQKQLFVEQHKHYLDEIIEQISEFSKRVILADANLDKVLSAYNKHRDKPIREQAENIIHLFTLTNLGAPAAFKYFDTTIDRKRYTSTKEVLDATLIHQSITGLYETRIDLSQLGGDGGPAPEAAAKGSSGGTVSLQDEHRLFDIPVTTSLPDVWLQDFPQAWAETGGLGRAKCQAPIIIDLKPTAVPVSIKQYPMSLEAHMGIRQHIIKFLELGVLRPCRSPWNTPLLPVKKPGTQDYRPVQDLREINKRTVDIHPTVPNPYNLLSTLKPDYSWYTVLDLKDAFFCLPLAPQSQELFAFEWKDPERGISGQLTWTRLPQGFKNSPTLFDEALHRDLTDFRTQHPEVTLLQYVDDLLLAAPTKKACTQGTRHLLQELGEKGYRASAKKAQICQTKVTYLGYILSEGKRWLTPGRIETVARIPPPRNPREVREFLGTAGFCRLWIPGFAELAAPLYALTKESTPFTWQTEHQLAFEALKKALLSAPALGLPDTSKPFTLFLDERQGIAKGVLTQKLGPWKRPVAYLSKKLDPVAAGWPPCLRIMAATAMLVKDSAKLTLGQPLTVITPHTLEAIVRQPPDRWITNARLTHYQALLLDTDRVQFGPPVTLNPATLLPVPENQPSPHDCRQVLAETHGTREDLKDQELPDADHTWYTDGSSYLDSGTRRAGAAVVDGHNTIWAQSLPPGTSAQKAELIALTKALELSKGKKANIYTDSRYAFATAHTHGSIYERRGLLTSEGKEIKNKAEIIALLKALFLPQEVAIIHCPGHQKGQDPVAVGNRQADRVARQAAMAEVLTLATEPDNTSHITAGKRTADGSEFEKRTADGSEFESPKKKAKVE

SEQ ID NO: 7641 - protein, 2095 aa, synthetic construct
MPAAKRVKLDGGDKKYSIGLDIGTNSVGWAVITDEYKVPSKKFKVLGNTDRHSIKKNLIGALLFDSGETAEATRLKRTARRRYTRRKNRICYLQEIFSNEMAKVDDSFFHRLEESFLVEEDKKHERHPIFGNIVDEVAYHEKYPTIYHLRKKLVDSTDKADLRLIYLALAHMIKFRGHFLIEGDLNPDNSDVDKLFIQLVQTYNQLFEENPINASGVDAKAILSARLSKSRRLENLIAQLPGEKKNGLFGNLIALSLGLTPNFKSNFDLAEDAKLQLSKDTYDDDLDNLLAQIGDQYADLFLAAKNLSDAILLSDILRVNTEITKAPLSASMIKRYDEHHQDLTLLKALVRQQLPEKYKEIFFDQSKNGYAGYIDGGASQEEFYKFIKPILEKMDGTEELLVKLNREDLLRKQRTFDNGSIPHQIHLGELHAILRRQEDFYPFLKDNREKIEKILTFRIPYYVGPLARGNSRFAWMTRKSEETITPWNFEEVVDKGASAQSFIERMTNFDKNLPNEKVLPKHSLLYEYFTVYNELTKVKYVTEGMRKPAFLSGEQKKAIVDLLFKTNRKVTVKQLKEDYFKKIECFDSVEISGVEDRFNASLGTYHDLLKIIKDKDFLDNEENEDILEDIVLTLTLFEDREMIEERLKTYAHLFDDKVMKQLKRRRYTGWGRLSRKLINGIRDKQSGKTILDFLKSDGFANRNFMQLIHDDSLTFKEDIQKAQVSGQGDSLHEHIANLAGSPAIKKGILQTVKVVDELVKVMGRHKPENIVIEMARENQTTQKGQKNSRERMKRIEEGIKELGSQILKEHPVENTQLQNEKLYLYYLQNGRDMYVDQELDINRLSDYDVDHIVPQSFLKDDSIDNKVLTRSDKARGKSDNVPSEEVVKKMKNYWRQLLNAKLITQRKFDNLTKAERGGLSELDKAGFIKRQLVETRQITKHVAQILDSRMNTKYDENDKLIREVKVITLKSKLVSDFRKDFQFYKVREINNYHHAHDAYLNAVVGTALIKKYPKLESEFVYGDYKVYDVRKMIAKSEQEIGKATAKYFFYSNIMNFFKTEITLANGEIRKRPLIETNGETGEIVWDKGRDFATVRKVLSMPQVNIVKKTEVQTGGFSKESILPKRNSDKLIARKKDWDPKKYGGFDSPTVAYSVLVVAKVEKGKSKKLKSVKELLGITIMERSSFEKNPIDFLEAKGYKEVKKDLIIKLPKYSLFELENGRKRMLASAGELQKGNELALPSKYVNFLYLASHYEKLKGSPEDNEQKQLFVEQHKHYLDEIIEQISEFSKRVILADANLDKVLSAYNKHRDKPIREQAENIIHLFTLTNLGAPAAFKYFDTTIDRKRYTSTKEVLDATLIHQSITGLYETRIDLSQLGGDGGPAPEAAAKGSSGGTLQLEEEYRLFEPESTQKQEMDIWLKNFPQAWAETGGMGTAHCQAPVLIQLKATATPISIRQYPMPHEAYQGIKPHIRRMLDQGILKPCQSPWNTPLLPVKKPGTEDYRPVQDLREVNKRVEDIHPTVPNPYNLLSTLPPSHPWYTVLDLKDAFFCLRLHSESQLLFAFEWRDPEIGLSGQLTWTRLPQGFKNSPTLFNEALHSDLADFRVRYPALVLLQYVDDLLLAAATRTECLEGTKALLETLGNKGYRASAKKAQICLQEVTYLGYSLKDGQRWLTKARKEAILSIPVPKNSRQVREFLGTAGYCRLWIPGFAELAAPLYPLTRPGTLFQWGTEQQLAFEDIKKALLSSPALGLPDITKPFELFIDENSGFAKGVLVQKLGPWKRPVAYLSKKLDTVASGWPPCLRMVAAIAILVKDAGKLTLGQPLTILTSHPVEALVRQPPNKWLSNARMTHYQAMLLDAERVHFGPTVSLNPATLLPLPSGGNHHDCLQILAETHGTRPDLTDQPLPDADLTWYTDGSSFIRNGEREAGAAVTTESEVIWAAPLPPGTSAQRAELIALTQALKMAEGKKLTVYTDSRYAFATTHVHGEIYRRRGWLTSEGKEIKNKNEILALLEALFLPKRLSIIHCPGHQKGDSPQAKGNRLADDTAKKAATETHSSLTVLPAGKRTADGSEFEKRTADGSEFESPKKKAKVE

SEQ ID NO: 7642 - protein, 2176 aa, synthetic construct
MPAAKRVKLDGGDKKYSIGLDIGTNSVGWAVITDEYKVPSKKFKVLGNTDRHSIKKNLIGALLFDSGETAEATRLKRTARRRYTRRKNRICYLQEIFSNEMAKVDDSFFHRLEESFLVEEDKKHERHPIFGNIVDEVAYHEKYPTIYHLRKKLVDSTDKADLRLIYLALAHMIKFRGHFLIEGDLNPDNSDVDKLFIQLVQTYNQLFEENPINASGVDAKAILSARLSKSRRLENLIAQLPGEKKNGLFGNLIALSLGLTPNFKSNFDLAEDAKLQLSKDTYDDDLDNLLAQIGDQYADLFLAAKNLSDAILLSDILRVNTEITKAPLSASMIKRYDEHHQDLTLLKALVRQQLPEKYKEIFFDQSKNGYAGYIDGGASQEEFYKFIKPILEKMDGTEELLVKLNREDLLRKQRTFDNGSIPHQIHLGELHAILRRQEDFYPFLKDNREKIEKILTFRIPYYVGPLARGNSRFAWMTRKSEETITPWNFEEVVDKGASAQSFIERMTNFDKNLPNEKVLPKHSLLYEYFTVYNELTKVKYVTEGMRKPAFLSGEQKKAIVDLLFKTNRKVTVKQLKEDYFKKIECFDSVEISGVEDRFNASLGTYHDLLKIIKDKDFLDNEENEDILEDIVLTLTLFEDREMIEERLKTYAHLFDDKVMKQLKRRRYTGWGRLSRKLINGIRDKQSGKTILDFLKSDGFANRNFMQLIHDDSLTFKEDIQKAQVSGQGDSLHEHIANLAGSPAIKKGILQTVKVVDELVKVMGRHKPENIVIEMARENQTTQKGQKNSRERMKRIEEGIKELGSQILKEHPVENTQLQNEKLYLYYLQNGRDMYVDQELDINRLSDYDVDHIVPQSFLKDDSIDNKVLTRSDKARGKSDNVPSEEVVKKMKNYWRQLLNAKLITQRKFDNLTKAERGGLSELDKAGFIKRQLVETRQITKHVAQILDSRMNTKYDENDKLIREVKVITLKSKLVSDFRKDFQFYKVREINNYHHAHDAYLNAVVGTALIKKYPKLESEFVYGDYKVYDVRKMIAKSEQEIGKATAKYFFYSNIMNFFKTEITLANGEIRKRPLIETNGETGEIVWDKGRDFATVRKVLSMPQVNIVKKTEVQTGGFSKESILPKRNSDKLIARKKDWDPKKYGGFDSPTVAYSVLVVAKVEKGKSKKLKSVKELLGITIMERSSFEKNPIDFLEAKGYKEVKKDLIIKLPKYSLFELENGRKRMLASAGELQKGNELALPSKYVNFLYLASHYEKLKGSPEDNEQKQLFVEQHKHYLDEIIEQISEFSKRVILADANLDKVLSAYNKHRDKPIREQAENIIHLFTLTNLGAPAAFKYFDTTIDRKRYTSTKEVLDATLIHQSITGLYETRIDLSQLGGDGGPAPEAAAKGSSGGMNPLQLLQPLPAEIKGTKLLAHWNSGATITCIPESFLEDEQPIKKTLIKTIHGEKQQNVYYVTFKVKGRKVEAEVIASPYEYILLSPTDVPWLTQQPLQLTILVPLQEYQEKILSKTALPEDQKQQLKTLFVKYDNLWQHWENQVGHRKIRPHNIATGDYPPRPQKQYPINPKAKPSIQIVIDDLLKQGVLTPQNSTMNTPVYPVPKPDGRWRMVLDYREVNKTIPLTAAQNQHSAGILATIVRQKYKTTLDLANGFWAHPITPESYWLTAFTWQGKQYCWTRLPQGFLNSPALFNADVVDLLKEIPNVQVYVDDIYLSHDDPKEHVQQLEKVFQILLQAGYVVSLKKSEIGQKTVEFLGFNITKEGRGLTDTFKTKLLNITPPKDLKQLQSILGLLNFARNFIPNFAELVQPLYNLIAPAKGKYIEWSEENTKQLNMVIEALNTASNLEERLPEQRLVIKVNTSPSAGYVRYYNETGKKPIMYLNYVFSKAELKFSMLEKLLTTMHKALIKAMDLAMGQEILVYSPIVSMTKIQKTPLPERKALPIRWITWMTYLEDPRIQFHYDKTLPELKHIPDVYTSSQSPVKHPSQYEGVFYTDGSAIKSPDPTKSNNAGMGIVHATYKPEYQVLNQWSIPLGNHTAQMAEIAAVEFACKKALKIPGPVLVITDSFYVAESANKELPYWKSNGFVNNKKKPLKHISKWKSIAECLSMKPDITIQHEKGISLQIPVFILKGNALADKLATQGSYVVNAGKRTADGSEFEKRTADGSEFESPKKKAKVE

SEQ ID NO: 7643 - protein, 2096 aa, synthetic construct
MPAAKRVKLDGGDKKYSIGLDIGTNSVGWAVITDEYKVPSKKFKVLGNTDRHSIKKNLIGALLFDSGETAEATRLKRTARRRYTRRKNRICYLQEIFSNEMAKVDDSFFHRLEESFLVEEDKKHERHPIFGNIVDEVAYHEKYPTIYHLRKKLVDSTDKADLRLIYLALAHMIKFRGHFLIEGDLNPDNSDVDKLFIQLVQTYNQLFEENPINASGVDAKAILSARLSKSRRLENLIAQLPGEKKNGLFGNLIALSLGLTPNFKSNFDLAEDAKLQLSKDTYDDDLDNLLAQIGDQYADLFLAAKNLSDAILLSDILRVNTEITKAPLSASMIKRYDEHHQDLTLLKALVRQQLPEKYKEIFFDQSKNGYAGYIDGGASQEEFYKFIKPILEKMDGTEELLVKLNREDLLRKQRTFDNGSIPHQIHLGELHAILRRQEDFYPFLKDNREKIEKILTFRIPYYVGPLARGNSRFAWMTRKSEETITPWNFEEVVDKGASAQSFIERMTNFDKNLPNEKVLPKHSLLYEYFTVYNELTKVKYVTEGMRKPAFLSGEQKKAIVDLLFKTNRKVTVKQLKEDYFKKIECFDSVEISGVEDRFNASLGTYHDLLKIIKDKDFLDNEENEDILEDIVLTLTLFEDREMIEERLKTYAHLFDDKVMKQLKRRRYTGWGRLSRKLINGIRDKQSGKTILDFLKSDGFANRNFMQLIHDDSLTFKEDIQKAQVSGQGDSLHEHIANLAGSPAIKKGILQTVKVVDELVKVMGRHKPENIVIEMARENQTTQKGQKNSRERMKRIEEGIKELGSQILKEHPVENTQLQNEKLYLYYLQNGRDMYVDQELDINRLSDYDVDHIVPQSFLKDDSIDNKVLTRSDKARGKSDNVPSEEVVKKMKNYWRQLLNAKLITQRKFDNLTKAERGGLSELDKAGFIKRQLVETRQITKHVAQILDSRMNTKYDENDKLIREVKVITLKSKLVSDFRKDFQFYKVREINNYHHAHDAYLNAVVGTALIKKYPKLESEFVYGDYKVYDVRKMIAKSEQEIGKATAKYFFYSNIMNFFKTEITLANGEIRKRPLIETNGETGEIVWDKGRDFATVRKVLSMPQVNIVKKTEVQTGGFSKESILPKRNSDKLIARKKDWDPKKYGGFDSPTVAYSVLVVAKVEKGKSKKLKSVKELLGITIMERSSFEKNPIDFLEAKGYKEVKKDLIIKLPKYSLFELENGRKRMLASAGELQKGNELALPSKYVNFLYLASHYEKLKGSPEDNEQKQLFVEQHKHYLDEIIEQISEFSKRVILADANLDKVLSAYNKHRDKPIREQAENIIHLFTLTNLGAPAAFKYFDTTIDRKRYTSTKEVLDATLIHQSITGLYETRIDLSQLGGDGGPAPEAAAKGSSGGTLGIEDEYRLHETSTEPDVSLGSTWLSDFPQAWAETGGMGLAVRQAPLIIPLKATSTPVSIQQYPMSHEARLGIKPHIQRLLDQGILVPCQSPWNTPLLPVKKPGTNDYRPVQDLREVNKRVEDIHPTVPNPYNLLSGLPPSHQWYTVLDLKDAFFCLRLHPTSQPLFAFEWRDPGMGISGQLTWTRLPQGFKNSPTLFNEALHRDLADFRIQHPDLILLQYVDDILLAATSELDCQQGTRALLQTLGDLGYRASAKKAQICQKQVKYLGYLLREGQRWLTEARKETVMGQPVPKTPRQLREFLGTAGFCRLWIPGFAEMAAPLYPLTKPGTLFSWGPDQQKAYQEIKQALLTAPALGLPDLTKPFELFVDEKQGYAKGVLTQKLGPWRRPVAYLSKKLDPVAAGWPPCLRMVAAIAVLTKDAGKLTMGQPLVILAPHAVEALVKQPPDRWLSNARMTHYQAMLLDTDRVQFGPVVALNPATLLPLPEEGAPHDCLEILAETHGTRPDLTDQPIPDADHTWYTDGSSFLQEGQRKAGAAVTTETEVIWAGALPAGTSAQRAELIALTQALKMAEGKRLNVYTDSRYAFATAHIHGEIYRRRGWLTSEGREIKNKSEILALLKALFLPKRLSIIHCLGHQKGDSAEARGNRLADQAAREAAIKTPPDTSTLLAGKRTADGSEFEKRTADGSEFESPKKKAKVE

SEQ ID NO: 7644 - protein, 2096 aa, synthetic construct; identical to SEQ ID NO: 7643

SEQ ID NO: 7645 - protein, 2096 aa, synthetic construct
MPAAKRVKLDGGDKKYSIGLDIGTNSVGWAVITDEYKVPSKKFKVLGNTDRHSIKKNLIGALLFDSGETAEATRLKRTARRRYTRRKNRICYLQEIFSNEMAKVDDSFFHRLEESFLVEEDKKHERHPIFGNIVDEVAYHEKYPTIYHLRKKLVDSTDKADLRLIYLALAHMIKFRGHFLIEGDLNPDNSDVDKLFIQLVQTYNQLFEENPINASGVDAKAILSARLSKSRRLENLIAQLPGEKKNGLFGNLIALSLGLTPNFKSNFDLAEDAKLQLSKDTYDDDLDNLLAQIGDQYADLFLAAKNLSDAILLSDILRVNTEITKAPLSASMIKRYDEHHQDLTLLKALVRQQLPEKYKEIFFDQSKNGYAGYIDGGASQEEFYKFIKPILEKMDGTEELLVKLNREDLLRKQRTFDNGSIPHQIHLGELHAILRRQEDFYPFLKDNREKIEKILTFRIPYYVGPLARGNSRFAWMTRKSEETITPWNFEEVVDKGASAQSFIERMTNFDKNLPNEKVLPKHSLLYEYFTVYNELTKVKYVTEGMRKPAFLSGEQKKAIVDLLFKTNRKVTVKQLKEDYFKKIECFDSVEISGVEDRFNASLGTYHDLLKIIKDKDFLDNEENEDILEDIVLTLTLFEDREMIEERLKTYAHLFDDKVMKQLKRRRYTGWGRLSRKLINGIRDKQSGKTILDFLKSDGFANRNFMQLIHDDSLTFKEDIQKAQVSGQGDSLHEHIANLAGSPAIKKGILQTVKVVDELVKVMGRHKPENIVIEMARENQTTQKGQKNSRERMKRIEEGIKELGSQILKEHPVENTQLQNEKLYLYYLQNGRDMYVDQELDINRLSDYDVDHIVPQSFLKDDSIDNKVLTRSDKARGKSDNVPSEEVVKKMKNYWRQLLNAKLITQRKFDNLTKAERGGLSELDKAGFIKRQLVETRQITKHVAQILDSRMNTKYDENDKLIREVKVITLKSKLVSDFRKDFQFYKVREINNYHHAHDAYLNAVVGTALIKKYPKLESEFVYGDYKVYDVRKMIAKSEQEIGKATAKYFFYSNIMNFFKTEITLANGEIRKRPLIETNGETGEIVWDKGRDFATVRKVLSMPQVNIVKKTEVQTGGFSKESILPKRNSDKLIARKKDWDPKKYGGFDSPTVAYSVLVVAKVEKGKSKKLKSVKELLGITIMERSSFEKNPIDFLEAKGYKEVKKDLIIKLPKYSLFELENGRKRMLASAGELQKGNELALPSKYVNFLYLASHYEKLKGSPEDNEQKQLFVEQHKHYLDEIIEQISEFSKRVILADANLDKVLSAYNKHRDKPIREQAENIIHLFTLTNLGAPAAFKYFDTTIDRKRYTSTKEVLDATLIHQSITGLYETRIDLSQLGGDGGPAPEAAAKGSSGGTLNIEDEYRLHETSKGPDVPLGSTWLSDFPQAWAETGGMGLAVRQAPLIIPLKATSTPVSIKQYPMSQEARLGIKPHIQRLLDQGILVPCQSPWNTPLLPVKKPGTNDYRPVQDLREVNKRVEDIHPTVPNPYNLLSGLPPSHQWYTVLDLKDAFFCLRLHPTSQSLFAFEWRDPEMGISGQLTWTRLPQGFKNSPTLFDEALHRDLADFRIQHPDLILLQYVDDLLLAATSELDCQQGTRALLQTLGDLGYRASAKKAQICQKQVKYLGYLLKEGQRWLTEARKETVMGQPTPKTPRQLREFLGTAGFCRLWIPGFAEMAAPLYPLTKTGTLFEWGPDQQKAYQEIKQALLTAPALGLPDLTKPFELFVDEKQGYAKGVLTQKLGPWRRPVAYLSKKLDPVAAGWPPCLRMVAAIAVLTKDAGKLTMGQPLVILAPHAVEALVKQPPDRWLSNARMTHYQALLLDTDRVQFGPIVALNPATLLPLPEEGLQHDCLDILAEAHGTRPDLTDQPLPDADHTWYTDGSSFLQEGQRKAGAAVTTETEVVWAKALPAGTSAQRAELIALTQALKMAEGKKLNVYTDSRYAFATAHIHGEIYRRRGLLTSEGKEIKNKDEILALLKALFLPKRLSIIHCPGHQKGNRAEARGNRMADQAAREVATRETPETSTLLAGKRTADGSEFEKRTADGSEFESPKKKAKVE

SEQ ID NO: 7646 - protein, 2090 aa, synthetic construct
MPAAKRVKLDGGDKKYSIGLDIGTNSVGWAVITDEYKVPSKKFKVLGNTDRHSIKKNLIGALLFDSGETAEATRLKRTARRRYTRRKNRICYLQEIFSNEMAKVDDSFFHRLEESFLVEEDKKHERHPIFGNIVDEVAYHEKYPTIYHLRKKLVDSTDKADLRLIYLALAHMIKFRGHFLIEGDLNPDNSDVDKLFIQLVQTYNQLFEENPINASGVDAKAILSARLSKSRRLENLIAQLPGEKKNGLFGNLIALSLGLTPNFKSNFDLAEDAKLQLSKDTYDDDLDNLLAQIGDQYADLFLAAKNLSDAILLSDILRVNTEITKAPLSASMIKRYDEHHQDLTLLKALVRQQLPEKYKEIFFDQSKNGYAGYIDGGASQEEFYKFIKPILEKMDGTEELLVKLNREDLLRKQRTFDNGSIPHQIHLGELHAILRRQEDFYPFLKDNREKIEKILTFRIPYYVGPLARGNSRFAWMTRKSEETITPWNFEEVVDKGASAQSFIERMTNFDKNLPNEKVLPKHSLLYEYFTVYNELTKVKYVTEGMRKPAFLSGEQKKAIVDLLFKTNRKVTVKQLKEDYFKKIECFDSVEISGVEDRFNASLGTYHDLLKIIKDKDFLDNEENEDILEDIVLTLTLFEDREMIEERLKTYAHLFDDKVMKQLKRRRYTGWGRLSRKLINGIRDKQSGKTILDFLKSDGFANRNFMQLIHDDSLTFKEDIQKAQVSGQGDSLHEHIANLAGSPAIKKGILQTVKVVDELVKVMGRHKPENIVIEMARENQTTQKGQKNSRERMKRIEEGIKELGSQILKEHPVENTQLQNEKLYLYYLQNGRDMYVDQELDINRLSDYDVDHIVPQSFLKDDSIDNKVLTRSDKARGKSDNVPSEEVVKKMKNYWRQLLNAKLITQRKFDNLTKAERGGLSELDKAGFIKRQLVETRQITKHVAQILDSRMNTKYDENDKLIREVKVITLKSKLVSDFRKDFQFYKVREINNYHHAHDAYLNAVVGTALIKKYPKLESEFVYGDYKVYDVRKMIAKSEQEIGKATAKYFFYSNIMNFFKTEITLANGEIRKRPLIETNGETGEIVWDKGRDFATVRKVLSMPQVNIVKKTEVQTGGFSKESILPKRNSDKLIARKKDWDPKKYGGFDSPTVAYSVLVVAKVEKGKSKKLKSVKELLGITIMERSSFEKNPIDFLEAKGYKEVKKDLIIKLPKYSLFELENGRKRMLASAGELQKGNELALPSKYVNFLYLASHYEKLKGSPEDNEQKQLFVEQHKHYLDEIIEQISEFSKRVILADANLDKVLSAYNKHRDKPIREQAENIIHLFTLTNLGAPAAFKYFDTTIDRKRYTSTKEVLDATLIHQSITGLYETRIDLSQLGGDGGPAPEAAAKGSSGGTLQLDDEYRLYSPLVKPDQNIQFWLEQFPQAWAETAGMGLAKQVPPQVIQLKASATPVSVRQYPLSKEAQEGIRPHVQRLIQQGILVPVQSPWNTPLLPVRKPGTNDYRPVQDLREVNKRVQDIHPTVPNPYNLLCALPPQRSWYTVLDLKDAFFCLRLHPTSQPLFAFEWRDPGTGRTGQLTWTRLPQGFKNSPTIFDEALHRDLANFRIQHPQVTLLQYVDDLLLAGATKQDCLEGTKALLLELSDLGYRASAKKAQICRREVTYLGYSLRDGQRWLTEARKKTVVQIPAPTTAKQVREFLGTAGFCRLWIPGFATLAAPLYPLTKEKGEFSWAPEHQKAFDAIKKALLSAPALALPDVTKPFTLYVDERKGVARGVLTQTLGPWRRPVAYLSKKLDPVASGWPVCLKAIAAVAILVKDADKLTLGQNITVIAPHALENIVRQPPDRWMTNARMTHYQSLLLTERVTFAPPAALNPATLLPEETDEPVTHDCHQLLIEETGVRKDLTDIPLTGEVLTWFTDGSSYVVEGKRMAGAAVVDGTRTIWASSLPEGTSAQKAELMALTQALRLAEGKSINIYTDSRYAFATAHVHGAIYKQRGLLTSAGREIKNKEEILSLLEALHLPKRLAIIHCPGHQKAKDPISRGNQMADRVAKQAAQGVNLLAGKRTADGSEFEKRTADGSEFESPKKKAKVE

SEQ ID NO: 7647 - protein, 2087 aa, synthetic construct
MPAAKRVKLDGGDKKYSIGLDIGTNSVGWAVITDEYKVPSKKFKVLGNTDRHSIKKNLIGALLFDSGETAEATRLKRTARRRYTRRKNRICYLQEIFSNEMAKVDDSFFHRLEESFLVEEDKKHERHPIFGNIVDEVAYHEKYPTIYHLRKKLVDSTDKADLRLIYLALAHMIKFRGHFLIEGDLNPDNSDVDKLFIQLVQTYNQLFEENPINASGVDAKAILSARLSKSRRLENLIAQLPGEKKNGLFGNLIALSLGLTPNFKSNFDLAEDAKLQLSKDTYDDDLDNLLAQIGDQYADLFLAAKNLSDAILLSDILRVNTEITKAPLSASMIKRYDEHHQDLTLLKALVRQQLPEKYKEIFFDQSKNGYAGYIDGGASQEEFYKFIKPILEKMDGTEELLVKLNREDLLRKQRTFDNGSIPHQIHLGELHAILRRQEDFYPFLKDNREKIEKILTFRIPYYVGPLARGNSRFAWMTRKSEETITPWNFEEVVDKGASAQSFIERMTNFDKNLPNEKVLPKHSLLYEYFTVYNELTKVKYVTEGMRKPAFLSGEQKKAIVDLLFKTNRKVTVKQLKEDYFKKIECFDSVEISGVEDRFNASLGTYHDLLKIIKDKDFLDNEENEDILEDIVLTLTLFEDREMIEERLKTYAHLFDDKVMKQLKRRRYTGWGRLSRKLINGIRDKQSGKTILDFLKSDGFANRNFMQLIHDDSLTFKEDIQKAQVSGQGDSLHEHIANLAGSPAIKKGILQTVKVVDELVKVMGRHKPENIVIEMARENQTTQKGQKNSRERMKRIEEGIKELGSQILKEHPVENTQLQNEKLYLYYLQNGRDMYVDQELDINRLSDYDVDHIVPQSFLKDDSIDNKVLTRSDKARGKSDNVPSEEVVKKMKNYWRQLLNAKLITQRKFDNLTKAERGGLSELDKAGFIKRQLVETRQITKHVAQILDSRMNTKYDENDKLIREVKVITLKSKLVSDFRKDFQFYKVREINNYHHAHDAYLNAVVGTALIKKYPKLESEFVYGDYKVYDVRKMIAKSEQEIGKATAKYFFYSNIMNFFKTEITLANGEIRKRPLIETNGETGEIVWDKGRDFATVRKVLSMPQVNIVKKTEVQTGGFSKESILPKRNSDKLIARKKDWDPKKYGGFDSPTVAYSVLVVAKVEKGKSKKLKSVKELLGITIMERSSFEKNPIDFLEAKGYKEVKKDLIIKLPKYSLFELENGRKRMLASAGELQKGNELALPSKYVNFLYLASHYEKLKGSPEDNEQKQLFVEQHKHYLDEIIEQISEFSKRVILADANLDKVLSAYNKHRDKPIREQAENIIHLFTLTNLGAPAAFKYFDTTIDRKRYTSTKEVLDATLIHQSITGLYETRIDLSQLGGDGGPAPEAAAKGSSGGIPWLMKKPLQLTTLVPLQEYEERLLKQTMLTGSYKEKLQSLFLKYDALWQHWENQVGHRRIKPHHIATGTVNPRPQKQYPINPKAKASIQTVINDLLKQGVLIQQNSIMNTPVYPVPKPDGKWRMVLDYREVNKTIPLIAAQNQHSAGILSSIFRGKYKTTLDLSNGFWAHSITPESYWLTAFTWLGQQYCWTRLPQGFLNSPALFNADVVDLLKEVPNVQVYVDDIYISHDDPREHLEQLEKVFSLLLNAGYVVSLKKSEIAQHEVEFLGFNITKEGRGLTETFKQKLLNITPPRDLKQLQSILGLLNFARNFIPNFSELVKPLYNIIATAPGKYITWTTDNSQQLQNIISMLNSAENLEERNPEVRLIMKVNTSPSAGYIRFYNEFAKRPIMYLNYVYTKAEVKFTNTEKLLTTIHKGLIKALDLGMGQEILVYSPIVSMTKIQKTPLPERKALPIRWITWMSYLEDPRIQFHYDKTLPELQQVPTVTDDIIAKIKHPSEFSMVFYTDGSAIKHPNVNKSHNAGMGIAQVQFKPEFTVINTWSIPLGDHTAQLAEVAAVEFACKKALKIDGPVLIVTDSFYVAESVNKELPYWQSNGFFNNKKKPLKHVSKWKSIADCIQLKPDIIIIHEKGHQPTASTFHTEGNNLADKLATQGSYVVNAGKRTADGSEFEKRTADGSEFESPKKKAKVE

SEQ ID NO: 7648 - protein, 2176 aa, synthetic construct
MPAAKRVKLDGGDKKYSIGLDIGTNSVGWAVITDEYKVPSKKFKVLGNTDRHSIKKNLIGALLFDSGETAEATRLKRTARRRYTRRKNRICYLQEIFSNEMAKVDDSFFHRLEESFLVEEDKKHERHPIFGNIVDEVAYHEKYPTIYHLRKKLVDSTDKADLRLIYLALAHMIKFRGHFLIEGDLNPDNSDVDKLFIQLVQTYNQLFEENPINASGVDAKAILSARLSKSRRLENLIAQLPGEKKNGLFGNLIALSLGLTPNFKSNFDLAEDAKLQLSKDTYDDDLDNLLAQIGDQYADLFLAAKNLSDAILLSDILRVNTEITKAPLSASMIKRYDEHHQDLTLLKALVRQQLPEKYKEIFFDQSKNGYAGYIDGGASQEEFYKFIKPILEKMDGTEELLVKLNREDLLRKQRTFDNGSIPHQIHLGELHAILRRQEDFYPFLKDNREKIEKILTFRIPYYVGPLARGNSRFAWMTRKSEETITPWNFEEVVDKGASAQSFIERMTNFDKNLPNEKVLPKHSLLYEYFTVYNELTKVKYVTEGMRKPAFLSGEQKKAIVDLLFKTNRKVTVKQLKEDYFKKIECFDSVEISGVEDRFNASLGTYHDLLKIIKDKDFLDNEENEDILEDIVLTLTLFEDREMIEERLKTYAHLFDDKVMKQLKRRRYTGWGRLSRKLINGIRDKQSGKTILDFLKSDGFANRNFMQLIHDDSLTFKEDIQKAQVSGQGDSLHEHIANLAGSPAIKKGILQTVKVVDELVKVMGRHKPENIVIEMARENQTTQKGQKNSRERMKRIEEGIKELGSQILKEHPVENTQLQNEKLYLYYLQNGRDMYVDQELDINRLSDYDVDHIVPQSFLKDDSIDNKVLTRSDKARGKSDNVPSEEVVKKMKNYWRQLLNAKLITQRKFDNLTKAERGGLSELDKAGFIKRQLVETRQITKHVAQILDSRMNTKYDENDKLIREVKVITLKSKLVSDFRKDFQFYKVREINNYHHAHDAYLNAVVGTALIKKYPKLESEFVYGDYKVYDVRKMIAKSEQEIGKATAKYFFYSNIMNFFKTEITLANGEIRKRPLIETNGETGEIVWDKGRDFATVRKVLSMPQVNIVKKTEVQTGGFSKESILPKRNSDKLIARKKDWDPKKYGGFDSPTVAYSVLVVAKVEKGKSKKLKSVKELLGITIMERSSFEKNPIDFLEAKGYKEVKKDLIIKLPKYSLFELENGRKRMLASAGELQKGNELALPSKYVNFLYLASHYEKLKGSPEDNEQKQLFVEQHKHYLDEIIEQISEFSKRVILADANLDKVLSAYNKHRDKPIREQAENIIHLFTLTNLGAPAAFKYFDTTIDRKRYTSTKEVLDATLIHQSITGLYETRIDLSQLGGDGGPAPEAAAKGSSGGMNPLQLLQPLPAEVKGTKLLAHWNSGATITCIPESFLEDEQPIKQTLIKTIHGEKQQNVYYLTFKVKGRKVEAEVIASPYEYILLSPTDVPWLTQQPLQLTILVPLQEYQDRILNKTALPEEQKQQLKALFTKYDNLWQHWENQVGHRKIRPHNIATGDYPPRPQKQYPINPKAKPSIQIVIDDLLKQGVLTPQNSTMNTPVYPVPKPDGRWRMVLDYREVNKTIPLTAAQNQHSAGILATIVRQKYKTTLDLANGFWAHPITPDSYWLTAFTWQGKQYCWTRLPQGFLNSPALFNADAVDLLKEVPNVQVYVDDIYLSHDNPHEHIQQLEKVFQILLQAGYVVSLKKSEIGQRTVEFLGFNITKEGRGLTDTFKTKLLNVTPPKDLKQLQSILGKLNFARNFIPNFAELVQTLYNLIASSPGKYIEWTEDNTKQLNKVIEALNTASNLEERLPDQRLVIKVNTSPSAGYVRYYNESGKKPIMYLNYVFSKAELKFSMLEKLLTTMHKALIKAMDLAMGQEILVYSPIVSMTKIQKTPLPERKALPIRWITWMTYLEDPRIQFHYDKTLPELKHIPDVYTSSIPPLKHPSQYEGVFCTDGSAIKSPDPTKSNNAGMGIVHAIYNPEYKILNQWSIPLGHHTAQMAEIAAVEFACKKALKVPGPVLVITDSFYVAESANKELPYWKSNGFVNNKKEPLKHISKWKSIAECLSIKPDITIQHEKGHQPINTSIHTEGNALADKLATQGSYVVNAGKRTADGSEFEKRTADGSEFESPKKKAKVE

SEQ ID NO: 7649 - protein, 2096 aa, synthetic construct
MPAAKRVKLDGGDKKYSIGLDIGTNSVGWAVITDEYKVPSKKFKVLGNTDRHSIKKNLIGALLFDSGETAEATRLKRTARRRYTRRKNRICYLQEIFSNEMAKVDDSFFHRLEESFLVEEDKKHERHPIFGNIVDEVAYHEKYPTIYHLRKKLVDSTDKADLRLIYLALAHMIKFRGHFLIEGDLNPDNSDVDKLFIQLVQTYNQLFEENPINASGVDAKAILSARLSKSRRLENLIAQLPGEKKNGLFGNLIALSLGLTPNFKSNFDLAEDAKLQLSKDTYDDDLDNLLAQIGDQYADLFLAAKNLSDAILLSDILRVNTEITKAPLSASMIKRYDEHHQDLTLLKALVRQQLPEKYKEIFFDQSKNGYAGYIDGGASQEEFYKFIKPILEKMDGTEELLVKLNREDLLRKQRTFDNGSIPHQIHLGELHAILRRQEDFYPFLKDNREKIEKILTFRIPYYVGPLARGNSRFAWMTRKSEETITPWNFEEVVDKGASAQSFIERMTNFDKNLPNEKVLPKHSLLYEYFTVYNELTKVKYVTEGMRKPAFLSGEQKKAIVDLLFKTNRKVTVKQLKEDYFKKIECFDSVEISGVEDRFNASLGTYHDLLKIIKDKDFLDNEENEDILEDIVLTLTLFEDREMIEERLKTYAHLFDDKVMKQLKRRRYTGWGRLSRKLINGIRDKQSGKTILDFLKSDGFANRNFMQLIHDDSLTFKEDIQKAQVSGQGDSLHEHIANLAGSPAIKKGILQTVKVVDELVKVMGRHKPENIVIEMARENQTTQKGQKNSRERMKRIEEGIKELGSQILKEHPVENTQLQNEKLYLYYLQNGRDMYVDQELDINRLSDYDVDHIVPQSFLKDDSIDNKVLTRSDKARGKSDNVPSEEVVKKMKNYWRQLLNAKLITQRKFDNLTKAERGGLSELDKAGFIKRQLVETRQITKHVAQILDSRMNTKYDENDKLIREVKVITLKSKLVSDFRKDFQFYKVREINNYHHAHDAYLNAVVGTALIKKYPKLESEFVYGDYKVYDVRKMIAKSEQEIGKATAKYFFYSNIMNFFKTEITLANGEIRKRPLIETNGETGEIVWDKGRDFATVRKVLSMPQVNIVKKTEVQTGGFSKESILPKRNSDKLIARKKDWDPKKYGGFDSPTVAYSVLVVAKVEKGKSKKLKSVKELLGITIMERSSFEKNPIDFLEAKGYKEVKKDLIIKLPKYSLFELENGRKRMLASAGELQKGNELALPSKYVNFLYLASHYEKLKGSPEDNEQKQLFVEQHKHYLDEIIEQISEFSKRVILADANLDKVLSAYNKHRDKPIREQAENIIHLFTLTNLGAPAAFKYFDTTIDRKRYTSTKEVLDATLIHQSITGLYETRIDLSQLGGDGGPAPEAAAKGSSGGTLNIEDEYRLHETSKEPDVPLGSTWLSDFPQAWAETGGMGLAVRQAPLIIPLKATSTPVSIKQYPMSQEARLGIKPHIQRLLDQGILVPCQSPWNTPLLPVKKPGTNDYRPVQDLREVNKRVEDIHPTVPNPYNLLSGLPPSHQWYTVLDLKDAFFCLRLHPTSQPLFAFEWRDPEMGISGQLTWTRLPQGFKNSPTLFNEALHRDLADFRIQHPDLILLQYVDDLLLAATSEQDCQRGTRALLQTLGNLGYRASAKKAQICQKQVKYLGYLLKEGQRWLTEARKETVMGQPTPKTPRQLREFLGTAGFCRLWIPGFAEMAAPLYPLTKPGTLFNWGPDQQKAYQEIKQALLTAPALGLPDLTKPFELFVDEKQGYAKGVLTQKLGPWRRPVAYLSKKLDPVAAGWPPCLRMVAAIAVLTKDAGKLTMGQPLVILAPHAVEALVKQPPDRWLSNARMTHYQAMLLDTDRVQFGPVVALNPATLLPLPEKEAPHDCLEILAETHGTRPDLTDQPIPDADYTWYTDGSSFLQEGQRRAGAAVTTETEVIWARALPAGTSAQRAELIALTQALKMAEGKKLNVYTDSRYAFATAHVHGEIYRRRGWLTSEGREIKNKNEILALLKALFLPKRLSIIHCPGHQKGNSAEARGNRMADQAAREAAMKAVLETSTLLAGKRTADGSEFEKRTADGSEFESPKKKAKVE

SEQ ID NO: 7650 - protein, 2122 aa, synthetic construct
MPAAKRVKLDGGDKKYSIGLDIGTNSVGWAVITDEYKVPSKKFKVLGNTDRHSIKKNLIGALLFDSGETAEATRLKRTARRRYTRRKNRICYLQEIFSNEMAKVDDSFFHRLEESFLVEEDKKHERHPIFGNIVDEVAYHEKYPTIYHLRKKLVDSTDKADLRLIYLALAHMIKFRGHFLIEGDLNPDNSDVDKLFIQLVQTYNQLFEENPINASGVDAKAILSARLSKSRRLENLIAQLPGEKKNGLFGNLIALSLGLTPNFKSNFDLAEDAKLQLSKDTYDDDLDNLLAQIGDQYADLFLAAKNLSDAILLSDILRVNTEITKAPLSASMIKRYDEHHQDLTLLKALVRQQLPEKYKEIFFDQSKNGYAGYIDGGASQEEFYKFIKPILEKMDGTEELLVKLNREDLLRKQRTFDNGSIPHQIHLGELHAILRRQEDFYPFLKDNREKIEKILTFRIPYYVGPLARGNSRFAWMTRKSEETITPWNFEEVVDKGASAQSFIERMTNFDKNLPNEKVLPKHSLLYEYFTVYNELTKVKYVTEGMRKPAFLSGEQKKAIVDLLFKTNRKVTVKQLKEDYFKKIECFDSVEISGVEDRFNASLGTYHDLLKIIKDKDFLDNEENEDILEDIVLTLTLFEDREMIEERLKTYAHLFDDKVMKQLKRRRYTGWGRLSRKLINGIRDKQSGKTILDFLKSDGFANRNFMQLIHDDSLTFKEDIQKAQVSGQGDSLHEHIANLAGSPAIKKGILQTVKVVDELVKVMGRHKPENIVIEMARENQTTQKGQKNSRERMKRIEEGIKELGSQILKEHPVENTQLQNEKLYLYYLQNGRDMYVDQELDINRLSDYDVDHIVPQSFLKDDSIDNKVLTRSDKARGKSDNVPSEEVVKKMKNYWRQLLNAKLITQRKFDNLTKAERGGLSELDKAGFIKRQLVETRQITKHVAQILDSRMNTKYDENDKLIREVKVITLKSKLVSDFRKDFQFYKVREINNYHHAHDAYLNAVVGTALIKKYPKLESEFVYGDYKVYDVRKMIAKSEQEIGKATAKYFFYSNIMNFFKTEITLANGEIRKRPLIETNGETGEIVWDKGRDFATVRKVLSMPQVNIVKKTEVQTGGFSKESILPKRNSDKLIARKKDWDPKKYGGFDSPTVAYSVLVVAKVEKGKSKKLKSVKELLGITIMERSSFEKNPIDFLEAKGYKEVKKDLIIKLPKYSLFELENGRKRMLASAGELQKGNELALPSKYVNFLYLASHYEKLKGSPEDNEQKQLFVEQHKHYLDEIIEQISEFSKRVILADANLDKVLSAYNKHRDKPIREQAENIIHLFTLTNLGAPAAFKYFDTTIDRKRYTSTKEVLDATLIHQSITGLYETRIDLSQLGGDGGAEAAAKEAAAKEAAAKEAAAKALEAEAAAKEAAAKEAAAKEAAAKAGGVPWILKKPLELTIKLDLEEQQGTLLNNSILSKKGKEELKQLFEKYSALWQSWENQVGHRRIRPHKIATGTVKPTPQKQYHINPKAKPDIQIVINDLLKQGVLIQKESTMNTPVYPVPKPNGRWRMVLDYRAVNKVTPLIAVQNQHSYGILGSLFKGRYKTTIDLSNGFWAHPIVPEDYWITAFTWQGKQYCWTVLPQGFLNSPGLFTGDVVDLLQGIPNVEVYVDDVYISHDSEKEHLEYLDILFNRLKEAGYIISLKKSNIANSIVDFLGFQITNEGRGLTDTFKEKLENITAPTTLKQLQSILGLLNFARNFIPDFTELIAPLYALIPKSTKNYVPWQIEHSTTLETLITKLNGAEYLQGRKGDKTLIMKVNASYTTGYIRYYNEGEKKPISYVSIVFSKTELKFTELEKLLTTVHKGLLKALDLSMGQNIHVYSPIVSMQNIQKTPQTAKKALASRWLSWLSYLEDPRIRFFYDPQMPALKDLPAVDTGKDNKKHPSNFQHIFYTDGSAITSPTKEGHLNAGMGIVYFINKDGNLQKQQEWSISLGNHTAQFAEIAAFEFALKKCLPLGGNILVVTDSNYVAKAYNEELDVWASNGFVNNRKKPLKHISKWKSVADLKRLRPDVVVTHEPGHQKLDSSPHAYGNNLADQLATQASFKVHAGKRTADGSEFEKRTADGSEFESPKKKAKVE

SEQ ID NO: 7651 - protein, 2122 aa, synthetic construct
MPAAKRVKLDGGDKKYSIGLDIGTNSVGWAVITDEYKVPSKKFKVLGNTDRHSIKKNLIGALLFDSGETAEATRLKRTARRRYTRRKNRICYLQEIFSNEMAKVDDSFFHRLEESFLVEEDKKHERHPIFGNIVDEVAYHEKYPTIYHLRKKLVDSTDKADLRLIYLALAHMIKFRGHFLIEGDLNPDNSDVDKLFIQLVQTYNQLFEENPINASGVDAKAILSARLSKSRRLENLIAQLPGEKKNGLFGNLIALSLGLTPNFKSNFDLAEDAKLQLSKDTYDDDLDNLLAQIGDQYADLFLAAKNLSDAILLSDILRVNTEITKAPLSASMIKRYDEHHQDLTLLKALVRQQLPEKYKEIFFDQSKNGYAGYIDGGASQEEFYKFIKPILEKMDGTEELLVKLNREDLLRKQRTFDNGSIPHQIHLGELHAILRRQEDFYPFLKDNREKIEKILTFRIPYYVGPLARGNSRFAWMTRKSEETITPWNFEEVVDKGASAQSFIERMTNFDKNLPNEKVLPKHSLLYEYFTVYNELTKVKYVTEGMRKPAFLSGEQKKAIVDLLFKTNRKVTVKQLKEDYFKKIECFDSVEISGVEDRFNASLGTYHDLLKIIKDKDFLDNEENEDILEDIVLTLTLFEDREMIEERLKTYAHLFDDKVMKQLKRRRYTGWGRLSRKLINGIRDKQSGKTILDFLKSDGFANRNFMQLIHDDSLTFKEDIQKAQVSGQGDSLHEHIANLAGSPAIKKGILQTVKVVDELVKVMGRHKPENIVIEMARENQTTQKGQKNSRERMKRIEEGIKELGSQILKEHPVENTQLQNEKLYLYYLQNGRDMYVDQELDINRLSDYDVDHIVPQSFLKDDSIDNKVLTRSDKARGKSDNVPSEEVVKKMKNYWRQLLNAKLITQRKFDNLTKAERGGLSELDKAGFIKRQLVETRQITKHVAQILDSRMNTKYDENDKLIREVKVITLKSKLVSDFRKDFQFYKVREINNYHHAHDAYLNAVVGTALIKKYPKLESEFVYGDYKVYDVRKMIAKSEQEIGKATAKYFFYSNIMNFFKTEITLANGEIRKRPLIETNGETGEIVWDKGRDFATVRKVLSMPQVNIVKKTEVQTGGFSKESILPKRNSDKLIARKKDWDPKKYGGFDSPTVAYSVLVVAKVEKGKSKKLKSVKELLGITIMERSSFEKNPIDFLEAKGYKEVKKDLIIKLPKYSLFELENGRKRMLASAGELQKGNELALPSKYVNFLYLASHYEKLKGSPEDNEQKQLFVEQHKHYLDEIIEQISEFSKRVILADANLDKVLSAYNKHRDKPIREQAENIIHLFTLTNLGAPAAFKYFDTTIDRKRYTSTKEVLDATLIHQSITGLYETRIDLSQLGGDGGAEAAAKEAAAKEAAAKEAAAKALEAEAAAKEAAAKEAAAKEAAAKAGGVPWILKKPLELTIKLDLEEQQGTLLNNSILSKKGKEELKQLFEKYSALWQSWENQVGHRRIRPHKIATGTVKPTPQKQYHINPKAKPDIQIVINDLLKQGVLIQKESTMNTPVYPVPKPNGRWRMVLDYRAVNKVTPLIAVQNQHSYGILGSLFKGRYKTTIDLSNGFWAHPIVPEDYWITAFTWQGKQYCWTVLPQGFLNSPGLFNGDVVDLLQGIPNVEVYVDDVYISHDSEKEHLEYLDILFNRLKEAGYIISLKKSNIANSIVDFLGFQITNEGRGLTDTFKEKLENITAPTTLKQLQSILGKLNFARNFIPDFTELIAPLYALIPKSPKNYVPWQIEHSTTLETLITKLNGAEYLQGRKGDKTLIMKVNASYTTGYIRYYNEGEKKPISYVSIVFSKTELKFTELEKLLTTVHKGLLKALDLSMGQNIHVYSPIVSMQNIQKTPQTAKKALASRWLSWLSYLEDPRIRFFYDPQMPALKDLPAVDTGKDNKKHPSNFQHIFYTDGSAITSPTKEGHLNAGMGIVYFINKDGNLQKQQEWSISLGNHTAQFAEIAAFEFALKKCLPLGGNILVVTDSNYVAKAYNEELDVWASNGFVNNRKKPLKHISKWKSVADLKRLRPDVVVTHEPGHQKLDSSPHAYGNNLADQLATQASFKVHAGKRTADGSEFEKRTADGSEFESPKKKAKVE

SEQ ID NO: 7652 - protein, 2122 aa, synthetic construct
MPAAKRVKLDGGDKKYSIGLDIGTNSVGWAVITDEYKVPSKKFKVLGNTDRHSIKKNLIGALLFDSGETAEATRLKRTARRRYTRRKNRICYLQEIFSNEMAKVDDSFFHRLEESFLVEEDKKHERHPIFGNIVDEVAYHEKYPTIYHLRKKLVDSTDKADLRLIYLALAHMIKFRGHFLIEGDLNPDNSDVDKLFIQLVQTYNQLFEENPINASGVDAKAILSARLSKSRRLENLIAQLPGEKKNGLFGNLIALSLGLTPNFKSNFDLAEDAKLQLSKDTYDDDLDNLLAQIGDQYADLFLAAKNLSDAILLSDILRVNTEITKAPLSASMIKRYDEHHQDLTLLKALVRQQLPEKYKEIFFDQSKNGYAGYIDGGASQEEFYKFIKPILEKMDGTEELLVKLNREDLLRKQRTFDNGSIPHQIHLGELHAILRRQEDFYPFLKDNREKIEKILTFRIPYYVGPLARGNSRFAWMTRKSEETITPWNFEEVVDKGASAQSFIERMTNFDKNLPNEKVLPKHSLLYEYFTVYNELTKVKYVTEGMRKPAFLSGEQKKAIVDLLFKTNRKVTVKQLKEDYFKKIECFDSVEISGVEDRFNASLGTYHDLLKIIKDKDFLDNEENEDILEDIVLTLTLFEDREMIEERLKTYAHLFDDKVMKQLKRRRYTGWGRLSRKLINGIRDKQSGKTILDFLKSDGFANRNFMQLIHDDSLTFKEDIQKAQVSGQGDSLHEHIANLAGSPAIKKGILQTVKVVDELVKVMGRHKPENIVIEMARENQTTQKGQKNSRERMKRIEEGIKELGSQILKEHPVENTQLQNEKLYLYYLQNGRDMYVDQELDINRLSDYDVDHIVPQSFLKDDSIDNKVLTRSDKARGKSDNVPSEEVVKKMKNYWRQLLNAKLITQRKFDNLTKAERGGLSELDKAGFIKRQLVETRQITKHVAQILDSRMNTKYDENDKLIREVKVITLKSKLVSDFRKDFQFYKVREINNYHHAHDAYLNAVVGTALIKKYPKLESEFVYGDYKVYDVRKMIAKSEQEIGKATAKYFFYSNIMNFFKTEITLANGEIRKRPLIETNGETGEIVWDKGRDFATVRKVLSMPQVNIVKKTEVQTGGFSKESILPKRNSDKLIARKKDWDPKKYGGFDSPTVAYSVLVVAKVEKGKSKKLKSVKELLGITIMERSSFEKNPIDFLEAKGYKEVKKDLIIKLPKYSLFELENGRKRMLASAGELQKGNELALPSKYVNFLYLASHYEKLKGSPEDNEQKQLFVEQHKHYLDEIIEQISEFSKRVILADANLDKVLSAYNKHRDKPIREQAENIIHLFTLTNLGAPAAFKYFDTTIDRKRYTSTKEVLDATLIHQSITGLYETRIDLSQLGGDGGAEAAAKEAAAKEAAAKEAAAKALEAEAAAKEAAAKEAAAKEAAAKAGGVPWLTQQPLQLTILVPLQEYQEKILSKTALPEDQKQQLKTLFVKYDNLWQHWENQVGHRKIRPHNIATGDYPPRPQKQYPINPKAKPSIQIVIDDLLKQGVLTPQNSTMNTPVYPVPKPDGRWRMVLDYREVNKTIPLTAAQNQHSAGILATIVRQKYKTTLDLANGFWAHPITPESYWLTAFTWQGKQYCWTRLPQGFLNSPALFTADVVDLLKEIPNVQVYVDDIYLSHDDPKEHVQQLEKVFQILLQAGYVVSLKKSEIGQKTVEFLGFNITKEGRGLTDTFKTKLLNITPPKDLKQLQSILGLLNFARNFIPNFAELVQPLYNLIASAKGKYIEWSEENTKQLNMVIEALNTASNLEERLPEQRLVIKVNTSPSAGYVRYYNETGKKPIMYLNYVFSKAELKFSMLEKLLTTMHKALIKAMDLAMGQEILVYSPIVSMTKIQKTPLPERKALPIRWITWMTYLEDPRIQFHYDKTLPELKHIPDVYTSSQSPVKHPSQYEGVFYTDGSAIKSPDPTKSNNAGMGIVHATYKPEYQVLNQWSIPLGNHTAQMAEIAAVEFACKKALKIPGPVLVITDSFYVAESANKELPYWKSNGFVNNKKKPLKHISKWKSIAECLSMKPDITIQHEKGISLQIPVFILKGNALADKLATQGSYVVNAGKRTADGSEFEKRTADGSEFESPKKKAKVE

SEQ ID NO: 7653 - protein, 2211 aa, synthetic construct
MPAAKRVKLDGGDKKYSIGLDIGTNSVGWAVITDEYKVPSKKFKVLGNTDRHSIKKNLIGALLFDSGETAEATRLKRTARRRYTRRKNRICYLQEIFSNEMAKVDDSFFHRLEESFLVEEDKKHERHPIFGNIVDEVAYHEKYPTIYHLRKKLVDSTDKADLRLIYLALAHMIKFRGHFLIEGDLNPDNSDVDKLFIQLVQTYNQLFEENPINASGVDAKAILSARLSKSRRLENLIAQLPGEKKNGLFGNLIALSLGLTPNFKSNFDLAEDAKLQLSKDTYDDDLDNLLAQIGDQYADLFLAAKNLSDAILLSDILRVNTEITKAPLSASMIKRYDEHHQDLTLLKALVRQQLPEKYKEIFFDQSKNGYAGYIDGGASQEEFYKFIKPILEKMDGTEELLVKLNREDLLRKQRTFDNGSIPHQIHLGELHAILRRQEDFYPFLKDNREKIEKILTFRIPYYVGPLARGNSRFAWMTRKSEETITPWNFEEVVDKGASAQSFIERMTNFDKNLPNEKVLPKHSLLYEYFTVYNELTKVKYVTEGMRKPAFLSGEQKKAIVDLLFKTNRKVTVKQLKEDYFKKIECFDSVEISGVEDRFNASLGTYHDLLKIIKDKDFLDNEENEDILEDIVLTLTLFEDREMIEERLKTYAHLFDDKVMKQLKRRRYTGWGRLSRKLINGIRDKQSGKTILDFLKSDGFANRNFMQLIHDDSLTFKEDIQKAQVSGQGDSLHEHIANLAGSPAIKKGILQTVKVVDELVKVMGRHKPENIVIEMARENQTTQKGQKNSRERMKRIEEGIKELGSQILKEHPVENTQLQNEKLYLYYLQNGRDMYVDQELDINRLSDYDVDHIVPQSFLKDDSIDNKVLTRSDKARGKSDNVPSEEVVKKMKNYWRQLLNAKLITQRKFDNLTKAERGGLSELDKAGFIKRQLVETRQITKHVAQILDSRMNTKYDENDKLIREVKVITLKSKLVSDFRKDFQFYKVREINNYHHAHDAYLNAVVGTALIKKYPKLESEFVYGDYKVYDVRKMIAKSEQEIGKATAKYFFYSNIMNFFKTEITLANGEIRKRPLIETNGETGEIVWDKGRDFATVRKVLSMPQVNIVKKTEVQTGGFSKESILPKRNSDKLIARKKDWDPKKYGGFDSPTVAYSVLVVAKVEKGKSKKLKSVKELLGITIMERSSFEKNPIDFLEAKGYKEVKKDLIIKLPKYSLFELENGRKRMLASAGELQKGNELALPSKYVNFLYLASHYEKLKGSPEDNEQKQLFVEQHKHYLDEIIEQISEFSKRVILADANLDKVLSAYNKHRDKPIREQAENIIHLFTLTNLGAPAAFKYFDTTIDRKRYTSTKEVLDATLIHQSITGLYETRIDLSQLGGDGGAEAAAKEAAAKEAAAKEAAAKALEAEAAAKEAAAKEAAAKEAAAKAGGMNPLQLLQPLPAEIKGTKLLAHWNSGATITCIPESFLEDEQPIKKTLIKTIHGEKQQNVYYVTFKVKGRKVEAEVIASPYEYILLSPTDVPWLTQQPLQLTILVPLQEYQEKILSKTALPEDQKQQLKTLFVKYDNLWQHWENQVGHRKIRPHNIATGDYPPRPQKQYPINPKAKPSIQIVIDDLLKQGVLTPQNSTMNTPVYPVPKPDGRWRMVLDYREVNKTIPLTAAQNQHSAGILATIVRQKYKTTLDLANGFWAHPITPESYWLTAFTWQGKQYCWTRLPQGFLNSPALFNADVVDLLKEIPNVQVYVDDIYLSHDDPKEHVQQLEKVFQILLQAGYVVSLKKSEIGQKTVEFLGFNITKEGRGLTDTFKTKLLNITPPKDLKQLQSILGLLNFARNFIPNFAELVQPLYNLIAPAKGKYIEWSEENTKQLNMVIEALNTASNLEERLPEQRLVIKVNTSPSAGYVRYYNETGKKPIMYLNYVFSKAELKFSMLEKLLTTMHKALIKAMDLAMGQEILVYSPIVSMTKIQKTPLPERKALPIRWITWMTYLEDPRIQFHYDKTLPELKHIPDVYTSSQSPVKHPSQYEGVFYTDGSAIKSPDPTKSNNAGMGIVHATYKPEYQVLNQWSIPLGNHTAQMAEIAAVEFACKKALKIPGPVLVITDSFYVAESANKELPYWKSNGFVNNKKKPLKHISKWKSIAECLSMKPDITIQHEKGISLQIPVFILKGNALADKLATQGSYVVNAGKRTADGSEFEKRTADGSEFESPKKKAKVE

SEQ ID NO: 7654 - protein, 2211 aa, synthetic construct
MPAAKRVKLDGGDKKYSIGLDIGTNSVGWAVITDEYKVPSKKFKVLGNTDRHSIKKNLIGALLFDSGETAEATRLKRTARRRYTRRKNRICYLQEIFSNEMAKVDDSFFHRLEESFLVEEDKKHERHPIFGNIVDEVAYHEKYPTIYHLRKKLVDSTDKADLRLIYLALAHMIKFRGHFLIEGDLNPDNSDVDKLFIQLVQTYNQLFEENPINASGVDAKAILSARLSKSRRLENLIAQLPGEKKNGLFGNLIALSLGLTPNFKSNFDLAEDAKLQLSKDTYDDDLDNLLAQIGDQYADLFLAAKNLSDAILLSDILRVNTEITKAPLSASMIKRYDEHHQDLTLLKALVRQQLPEKYKEIFFDQSKNGYAGYIDGGASQEEFYKFIKPILEKMDGTEELLVKLNREDLLRKQRTFDNGSIPHQIHLGELHAILRRQEDFYPFLKDNREKIEKILTFRIPYYVGPLARGNSRFAWMTRKSEETITPWNFEEVVDKGASAQSFIERMTNFDKNLPNEKVLPKHSLLYEYFTVYNELTKVKYVTEGMRKPAFLSGEQKKAIVDLLFKTNRKVTVKQLKEDYFKKIECFDSVEISGVEDRFNASLGTYHDLLKIIKDKDFLDNEENEDILEDIVLTLTLFEDREMIEERLKTYAHLFDDKVMKQLKRRRYTGWGRLSRKLINGIRDKQSGKTILDFLKSDGFANRNFMQLIHDDSLTFKEDIQKAQVSGQGDSLHEHIANLAGSPAIKKGILQTVKVVDELVKVMGRHKPENIVIEMARENQTTQKGQKNSRERMKRIEEGIKELGSQILKEHPVENTQLQNEKLYLYYLQNGRDMYVDQELDINRLSDYDVDHIVPQSFLKDDSIDNKVLTRSDKARGKSDNVPSEEVVKKMKNYWRQLLNAKLITQRKFDNLTKAERGGLSELDKAGFIKRQLVETRQITKHVAQILDSRMNTKYDENDKLIREVKVITLKSKLVSDFRKDFQFYKVREINNYHHAHDAYLNAVVGTALIKKYPKLESEFVYGDYKVYDVRKMIAKSEQEIGKATAKYFFYSNIMNFFKTEITLANGEIRKRPLIETNGETGEIVWDKGRDFATVRKVLSMPQVNIVKKTEVQTGGFSKESILPKRNSDKLIARKKDWDPKKYGGFDSPTVAYSVLVVAKVEKGKSKKLKSVKELLGITIMERSSFEKNPIDFLEAKGYKEVKKDLIIKLPKYSLFELENGRKRMLASAGELQKGNELALPSKYVNFLYLASHYEKLKGSPEDNEQKQLFVEQHKHYLDEIIEQISEFSKRVILADANLDKVLSAYNKHRDKPIREQAENIIHLFTLTNLGAPAAFKYFDTTIDRKRYTSTKEVLDATLIHQSITGLYETRIDLSQLGGDGGAEAAAKEAAAKEAAAKEAAAKALEAEAAAKEAAAKEAAAKEAAAKAGGMNPLQLLQPLPAEIKGTKLLAHWNSGATITCIPESFLEDEQPIKKTLIKTIHGEKQQNVYYVTFKVKGRKVEAEVIASPYEYILLSPTDVPWLTQQPLQLTILVPLQEYQEKILSKTALPEDQKQQLKTLFVKYDNLWQHWENQVGHRKIRPHNIATGDYPPRPQKQYPINPKAKPSIQIVIDDLLKQGVLTPQNSTMNTPVYPVPKPDGRWRMVLDYREVNKTIPLTAAQNQHSAGILATIVRQKYKTTLDLANGFWAHPITPESYWLTAFTWQGKQYCWTRLPQGFLNSPALFNADVVDLLKEIPNVQVYVDDIYLSHDDPKEHVQQLEKVFQILLQAGYVVSLKKSEIGQKTVEFLGFNITKEGRGLTDTFKTKLLNITPPKDLKQLQSILGKLNFARNFIPNFAELVQPLYNLIAPAKGKYIEWSEENTKQLNMVIEALNTASNLEERLPEQRLVIKVNTSPSAGYVRYYNETGKKPIMYLNYVFSKAELKFSMLEKLLTTMHKALIKAMDLAMGQEILVYSPIVSMTKIQKTPLPERKALPIRWITWMTYLEDPRIQFHYDKTLPELKHIPDVYTSSQSPVKHPSQYEGVFYTDGSAIKSPDPTKSNNAGMGIVHATYKPEYQVLNQWSIPLGNHTAQMAEIAAVEFACKKALKIPGPVLVITDSFYVAESANKELPYWKSNGFVNNKKKPLKHISKWKSIAECLSMKPDITIQHEKGISLQIPVFILKGNALADKLATQGSYVVNAGKRTADGSEFEKRTADGSEFESPKKKAKVE

SEQ ID NO: 7655 - protein, 2162 aa, synthetic construct
MPAAKRVKLDGGDKKYSIGLDIGTNSVGWAVITDEYKVPSKKFKVLGNTDRHSIKKNLIGALLFDSGETAEATRLKRTARRRYTRRKNRICYLQEIFSNEMAKVDDSFFHRLEESFLVEEDKKHERHPIFGNIVDEVAYHEKYPTIYHLRKKLVDSTDKADLRLIYLALAHMIKFRGHFLIEGDLNPDNSDVDKLFIQLVQTYNQLFEENPINASGVDAKAILSARLSKSRRLENLIAQLPGEKKNGLFGNLIALSLGLTPNFKSNFDLAEDAKLQLSKDTYDDDLDNLLAQIGDQYADLFLAAKNLSDAILLSDILRVNTEITKAPLSASMIKRYDEHHQDLTLLKALVRQQLPEKYKEIFFDQSKNGYAGYIDGGASQEEFYKFIKPILEKMDGTEELLVKLNREDLLRKQRTFDNGSIPHQIHLGELHAILRRQEDFYPFLKDNREKIEKILTFRIPYYVGPLARGNSRFAWMTRKSEETITPWNFEEVVDKGASAQSFIERMTNFDKNLPNEKVLPKHSLLYEYFTVYNELTKVKYVTEGMRKPAFLSGEQKKAIVDLLFKTNRKVTVKQLKEDYFKKIECFDSVEISGVEDRFNASLGTYHDLLKIIKDKDFLDNEENEDILEDIVLTLTLFEDREMIEERLKTYAHLFDDKVMKQLKRRRYTGWGRLSRKLINGIRDKQSGKTILDFLKSDGFANRNFMQLIHDDSLTFKEDIQKAQVSGQGDSLHEHIANLAGSPAIKKGILQTVKVVDELVKVMGRHKPENIVIEMARENQTTQKGQKNSRERMKRIEEGIKELGSQILKEHPVENTQLQNEKLYLYYLQNGRDMYVDQELDINRLSDYDVDHIVPQSFLKDDSIDNKVLTRSDKARGKSDNVPSEEVVKKMKNYWRQLLNAKLITQRKFDNLTKAERGGLSELDKAGFIKRQLVETRQITKHVAQILDSRMNTKYDENDKLIREVKVITLKSKLVSDFRKDFQFYKVREINNYHHAHDAYLNAVVGTALIKKYPKLESEFVYGDYKVYDVRKMIAKSEQEIGKATAKYFFYSNIMNFFKTEITLANGEIRKRPLIETNGETGEIVWDKGRDFATVRKVLSMPQVNIVKKTEVQTGGFSKESILPKRNSDKLIARKKDWDPKKYGGFDSPTVAYSVLVVAKVEKGKSKKLKSVKELLGITIMERSSFEKNPIDFLEAKGYKEVKKDLIIKLPKYSLFELENGRKRMLASAGELQKGNELALPSKYVNFLYLASHYEKLKGSPEDNEQKQLFVEQHKHYLDEIIEQISEFSKRVILADANLDKVLSAYNKHRDKPIREQAENIIHLFTLTNLGAPAAFKYFDTTIDRKRYTSTKEVLDATLIHQSITGLYETRIDLSQLGGDGGAEAAAKEAAAKEAAAKEAAAKALEAEAAAKEAAAKEAAAKEAAAKAGGLLGRDLLTKLKAQIQFSTEGPQVTWEDRPAMCLVLNLEEEYRLHEKPVPPSIDPSWLQLFPMVWAEKAGMGLANQVPPVVVELKSDASPVAVRQYPMSKEAREGIRPHIQRFLDLGILVPCQSPWNTPLLPVKKPGTNDYRPVQDLREVNKRVQDIHPTVPNPYNLLSSLPPSHTWYSVLDLKDAFFCLKLHPNSQPLFAFEWRDPEKGNTGQLTWTRLPQGFKNSPTLFDEALHRDLASFRALNPQVVMLQYVDDLLVAAPTYRDCKEGTRRLLQELSKLGYRVSAKKAQLCREEVTYLGYLLKGGKRWLTPARKATVMKIPTPTTPRQVREFLGTAGFCRLWIPGFASLAAPLYPLTREKVPFTWTEAHQEAFGRIKEALLSAPALALPDLTKPFALYVDEKEGVARGVLTQTLGPWRRPVAYLSKKLDPVASGWPTCLKAIAAVALLLKDADKLTLGQNVLVIAPHNLESIVRQPPDRWMTNARMTHYQSLLLNERVSFAPPAILNPATLLPVESDDTPIHICSEILAEETGTRPDLRDQPLPGVPAWYTDGSSFIMDGRRQAGAAIVDNKRTVWASNLPEGTSAQKAELIALTQALRLAEGKSINIYTDSRYAFATAHVHGAIYKQRGLLTSAGKDIKNKEEILALLEAIHLPKRVAIIHCPGHQRGTDPVATGNRKADEAAKQAAQSTRILTETTKNAGKRTADGSEFEKRTADGSEFESPKKKAKVE

SEQ ID NO: 7656 - protein, 2253 aa, synthetic construct
MPAAKRVKLDGGDKKYSIGLDIGTNSVGWAVITDEYKVPSKKFKVLGNTDRHSIKKNLIGALLFDSGETAEATRLKRTARRRYTRRKNRICYLQEIFSNEMAKVDDSFFHRLEESFLVEEDKKHERHPIFGNIVDEVAYHEKYPTIYHLRKKLVDSTDKADLRLIYLALAHMIKFRGHFLIEGDLNPDNSDVDKLFIQLVQTYNQLFEENPINASGVDAKAILSARLSKSRRLENLIAQLPGEKKNGLFGNLIALSLGLTPNFKSNFDLAEDAKLQLSKDTYDDDLDNLLAQIGDQYADLFLAAKNLSDAILLSDILRVNTEITKAPLSASMIKRYDEHHQDLTLLKALVRQQLPEKYKEIFFDQSKNGYAGYIDGGASQEEFYKFIKPILEKMDGTEELLVKLNREDLLRKQRTFDNGSIPHQIHLGELHAILRRQEDFYPFLKDNREKIEKILTFRIPYYVGPLARGNSRFAWMTRKSEETITPWNFEEVVDKGASAQSFIERMTNFDKNLPNEKVLPKHSLLYEYFTVYNELTKVKYVTEGMRKPAFLSGEQKKAIVDLLFKTNRKVTVKQLKEDYFKKIECFDSVEISGVEDRFNASLGTYHDLLKIIKDKDFLDNEENEDILEDIVLTLTLFEDREMIEERLKTYAHLFDDKVMKQLKRRRYTGWGRLSRKLINGIRDKQSGKTILDFLKSDGFANRNFMQLIHDDSLTFKEDIQKAQVSGQGDSLHEHIANLAGSPAIKKGILQTVKVVDELVKVMGRHKPENIVIEMARENQTTQKGQKNSRERMKRIEEGIKELGSQILKEHPVENTQLQNEKLYLYYLQNGRDMYVDQELDINRLSDYDVDHIVPQSFLKDDSIDNKVLTRSDKARGKSDNVPSEEVVKKMKNYWRQLLNAKLITQRKFDNLTKAERGGLSELDKAGFIKRQLVETRQITKHVAQILDSRMNTKYDENDKLIREVKVITLKSKLVSDFRKDFQFYKVREINNYHHAHDAYLNAVVGTALIKKYPKLESEFVYGDYKVYDVRKMIAKSEQEIGKATAKYFFYSNIMNFFKTEITLANGEIRKRPLIETNGETGEIVWDKGRDFATVRKVLSMPQVNIVKKTEVQTGGFSKESILPKRNSDKLIARKKDWDPKKYGGFDSPTVAYSVLVVAKVEKGKSKKLKSVKELLGITIMERSSFEKNPIDFLEAKGYKEVKKDLIIKLPKYSLFELENGRKRMLASAGELQKGNELALPSKYVNFLYLASHYEKLKGSPEDNEQKQLFVEQHKHYLDEIIEQISEFSKRVILADANLDKVLSAYNKHRDKPIREQAENIIHLFTLTNLGAPAAFKYFDTTIDRKRYTSTKEVLDATLIHQSITGLYETRIDLSQLGGDGGAEAAAKEAAAKEAAAKEAAAKALEAEAAAKEAAAKEAAAKEAAAKAGGTLGDQGSRGSDPLPEPRVTLTVEGIPTEFLVNTGAEHSVLTKPMGKMGSKRTVVAGATGSKVYPWTTKRLLKIGQKQVTHSFLVIPECPAPLLGRDLLTKLKAQIQFSTEGPQVTWEDRPAMCLVLNLEEEYRLHEKPVPPSIDPSWLQLFPMVWAEKAGMGLANQVPPVVVELKSDASPVAVRQYPMSKEAREGIRPHIQRFLDLGILVPCQSPWNTPLLPVKKPGTNDYRPVQDLREVNKRVQDIHPTVPNPYNLLSSLPPSHTWYSVLDLKDAFFCLKLHPNSQPLFAFEWRDPEKGNTGQLTWTRLPQGFKNSPTLFNEALHRDLASFRALNPQVVMLQYVDDLLVAAPTYRDCKEGTRRLLQELSKLGYRVSAKKAQLCREEVTYLGYLLKGGKRWLTPARKATVMKIPTPTTPRQVREFLGTAGFCRLWIPGFASLAAPLYPLTRPKVPFTWTEAHQEAFGRIKEALLSAPALALPDLTKPFALYVDEKEGVARGVLTQTLGPWRRPVAYLSKKLDPVASGWPTCLKAIAAVALLLKDADKLTLGQNVLVIAPHNLESIVRQPPDRWMTNARMTHYQSLLLNERVSFAPPAILNPATLLPVESDDTPIHICSEILAEETGTRPDLRDQPLPGVPAWYTDGSSFIMDGRRQAGAAIVDNKRTVWASNLPEGTSAQKAELIALTQALRLAEGKSINIYTDSRYAFATAHVHGAIYKQRGWLTSAGKDIKNKEEILALLEAIHLPKRVAIIHCPGHQRGTDPVATGNRKADEAAKQAAQSTRILTETTKNAGKRTADGSEFEKRTADGSEFESPKKKAKVE

SEQ ID NO: 7657 - protein, 2131 aa, synthetic construct
MPAAKRVKLDGGDKKYSIGLDIGTNSVGWAVITDEYKVPSKKFKVLGNTDRHSIKKNLIGALLFDSGETAEATRLKRTARRRYTRRKNRICYLQEIFSNEMAKVDDSFFHRLEESFLVEEDKKHERHPIFGNIVDEVAYHEKYPTIYHLRKKLVDSTDKADLRLIYLALAHMIKFRGHFLIEGDLNPDNSDVDKLFIQLVQTYNQLFEENPINASGVDAKAILSARLSKSRRLENLIAQLPGEKKNGLFGNLIALSLGLTPNFKSNFDLAEDAKLQLSKDTYDDDLDNLLAQIGDQYADLFLAAKNLSDAILLSDILRVNTEITKAPLSASMIKRYDEHHQDLTLLKALVRQQLPEKYKEIFFDQSKNGYAGYIDGGASQEEFYKFIKPILEKMDGTEELLVKLNREDLLRKQRTFDNGSIPHQIHLGELHAILRRQEDFYPFLKDNREKIEKILTFRIPYYVGPLARGNSRFAWMTRKSEETITPWNFEEVVDKGASAQSFIERMTNFDKNLPNEKVLPKHSLLYEYFTVYNELTKVKYVTEGMRKPAFLSGEQKKAIVDLLFKTNRKVTVKQLKEDYFKKIECFDSVEISGVEDRFNASLGTYHDLLKIIKDKDFLDNEENEDILEDIVLTLTLFEDREMIEERLKTYAHLFDDKVMKQLKRRRYTGWGRLSRKLINGIRDKQSGKTILDFLKSDGFANRNFMQLIHDDSLTFKEDIQKAQVSGQGDSLHEHIANLAGSPAIKKGILQTVKVVDELVKVMGRHKPENIVIEMARENQTTQKGQKNSRERMKRIEEGIKELGSQILKEHPVENTQLQNEKLYLYYLQNGRDMYVDQELDINRLSDYDVDHIVPQSFLKDDSIDNKVLTRSDKARGKSDNVPSEEVVKKMKNYWRQLLNAKLITQRKFDNLTKAERGGLSELDKAGFIKRQLVETRQITKHVAQILDSRMNTKYDENDKLIREVKVITLKSKLVSDFRKDFQFYKVREINNYHHAHDAYLNAVVGTALIKKYPKLESEFVYGDYKVYDVRKMIAKSEQEIGKATAKYFFYSNIMNFFKTEITLANGEIRKRPLIETNGETGEIVWDKGRDFATVRKVLSMPQVNIVKKTEVQTGGFSKESILPKRNSDKLIARKKDWDPKKYGGFDSPTVAYSVLVVAKVEKGKSKKLKSVKELLGITIMERSSFEKNPIDFLEAKGYKEVKKDLIIKLPKYSLFELENGRKRMLASAGELQKGNELALPSKYVNFLYLASHYEKLKGSPEDNEQKQLFVEQHKHYLDEIIEQISEFSKRVILADANLDKVLSAYNKHRDKPIREQAENIIHLFTLTNLGAPAAFKYFDTTIDRKRYTSTKEVLDATLIHQSITGLYETRIDLSQLGGDGGAEAAAKEAAAKEAAAKEAAAKALEAEAAAKEAAAKEAAAKEAAAKAGGTLNLEDEYRLYETSAEPEVSPGSTWLSDFPQAWAETGGMGLAVRQAPLIIPLKATSTPVSIKQYPMSQEAKLGIKPHIQRLLDQGILVPCQSPWNTPLLPVKKPGTNDYRPVQDLREVNKRVEDIHPTVPNPYNLLSGLPPSHRWYTVLDLKDAFFCLRLHPTSQPLFAFEWRDPGMGISGQLTWTRLPQGFKNSPTLFNEALHRDLADFRIQHPDLILLQYVDDILLAATSELDCQQGTRALLLTLGNLGYRASAKKAQLCQKQVKYLGYLLKEGQRWLTEARKETVMGQPTPKTPRQLREFLGTAGFCRLWIPGFAEMAAPLYPLTKPGTLFNWGPDQQKAYQEIKQALLTAPALGLPDLTKPFELFVDEKQGYAKGVLTQKLGPWRRPVAYLSKKLDPVAAGWPPCLRMVAAIAVLRKDAGKLTMGQPLVILAPHAVEALVKQPPDRWLSNARMTHYQAMLLDTDRVQFGPVVALNPATLLPLPEEGAPHDCLEILAETHGTRPDLTDQPIPDADHTWYTDGSSFLQEGQRKAGAAVTTETEVIWARALPAGTSAQRAELIALTQALKMAEGKRLNVYTDSRYAFATAHIHGEIYRRRGWLTSEGREIKNKSEILALLKALFLPKRLSIIHCLGHQKGDSAEARGNRLADQAAREAAIKTPPDTSTLLAGKRTADGSEFEKRTADGSEFESPKKKAKVE

SEQ ID NO: 7658 - protein, 2131 aa, synthetic construct
MPAAKRVKLDGGDKKYSIGLDIGTNSVGWAVITDEYKVPSKKFKVLGNTDRHSIKKNLIGALLFDSGETAEATRLKRTARRRYTRRKNRICYLQEIFSNEMAKVDDSFFHRLEESFLVEEDKKHERHPIFGNIVDEVAYHEKYPTIYHLRKKLVDSTDKADLRLIYLALAHMIKFRGHFLIEGDLNPDNSDVDKLFIQLVQTYNQLFEENPINASGVDAKAILSARLSKSRRLENLIAQLPGEKKNGLFGNLIALSLGLTPNFKSNFDLAEDAKLQLSKDTYDDDLDNLLAQIGDQYADLFLAAKNLSDAILLSDILRVNTEITKAPLSASMIKRYDEHHQDLTLLKALVRQQLPEKYKEIFFDQSKNGYAGYIDGGASQEEFYKFIKPILEKMDGTEELLVKLNREDLLRKQRTFDNGSIPHQIHLGELHAILRRQEDFYPFLKDNREKIEKILTFRIPYYVGPLARGNSRFAWMTRKSEETITPWNFEEVVDKGASAQSFIERMTNFDKNLPNEKVLPKHSLLYEYFTVYNELTKVKYVTEGMRKPAFLSGEQKKAIVDLLFKTNRKVTVKQLKEDYFKKIECFDSVEISGVEDRFNASLGTYHDLLKIIKDKDFLDNEENEDILEDIVLTLTLFEDREMIEERLKTYAHLFDDKVMKQLKRRRYTGWGRLSRKLINGIRDKQSGKTILDFLKSDGFANRNFMQLIHDDSLTFKEDIQKAQVSGQGDSLHEHIANLAGSPAIKKGILQTVKVVDELVKVMGRHKPENIVIEMARENQTTQKGQKNSRERMKRIEEGIKELGSQILKEHPVENTQLQNEKLYLYYLQNGRDMYVDQELDINRLSDYDVDHIVPQSFLKDDSIDNKVLTRSDKARGKSDNVPSEEVVKKMKNYWRQLLNAKLITQRKFDNLTKAERGGLSELDKAGFIKRQLVETRQITKHVAQILDSRMNTKYDENDKLIREVKVITLKSKLVSDFRKDFQFYKVREINNYHHAHDAYLNAVVGTALIKKYPKLESEFVYGDYKVYDVRKMIAKSEQEIGKATAKYFFYSNIMNFFKTEITLANGEIRKRPLIETNGETGEIVWDKGRDFATVRKVLSMPQVNIVKKTEVQTGGFSKESILPKRNSDKLIARKKDWDPKKYGGFDSPTVAYSVLVVAKVEKGKSKKLKSVKELLGITIMERSSFEKNPIDFLEAKGYKEVKKDLIIKLPKYSLFELENGRKRMLASAGELQKGNELALPSKYVNFLYLASHYEKLKGSPEDNEQKQLFVEQHKHYLDEIIEQISEFSKRVILADANLDKVLSAYNKHRDKPIREQAENIIHLFTLTNLGAPAAFKYFDTTIDRKRYTSTKEVLDATLIHQSITGLYETRIDLSQLGGDGGAEAAAKEAAAKEAAAKEAAAKALEAEAAAKEAAAKEAAAKEAAAKAGGTLNIEDEYRLHETSKEPDVSLGSTWLSDFPQAWAETGGMGLAVRQAPLIIPLKATSTPVSIKQYPMSQEARLGIKPHIQRLLDQGILVPCQSPWNTPLLPVKKPGTNDYRPVQDLREVNKRVEDIHPTVPNPYNLLSGLPPSHQWYTVLDLKDAFFCLRLHPTSQPLFAFEWRDPEMGISGQLTWTRLPQGFKNSPTLFNEALHRDLAGFRIQHPDLILLQYVDDLLLAATSELDCQQGTRALLQTLGDLGYRASAKKAQICQKQVKYLGYLLKEGQRWLTEARKETVMGQPIPKTPRQLREFLGTAGFCRLWIPGFAEMAAPLYPLTKPGTLFNWGPDQQKAFQEIKQALLTAPALGLPDLTKPFELFVDEKQGYAKGVLTQKLGPWRRPVAYLSKKLDPVAAGWPPCLRMVAAIAVLTKDAGKLTMGQPLVILAPHAVEALVKQPPDRWLSNARMTHYQALLLDTDRVQFGPVVALNPATLLPLPEEGLQHDCLDILAEAHGTRSDLMDQPLPDADHTWYTDGSSFLQEGQRKAGAAVTTETEVIWARALPAGTSAQRAELIALTQALKMAEGKKLNVYTDSRYAFATAHIHGEIYRRRGWLTSEGKEIKNKDEILALLKALFLPKRLSIIHCPGHQKGNSAEARGNRMADQAAREVATRETPETSTLLAGKRTADGSEFEKRTADGSEFESPKKKAKVE

SEQ ID NO: 7659 - protein, 2131 aa, synthetic construct
MPAAKRVKLDGGDKKYSIGLDIGTNSVGWAVITDEYKVPSKKFKVLGNTDRHSIKKNLIGALLFDSGETAEATRLKRTARRRYTRRKNRICYLQEIFSNEMAKVDDSFFHRLEESFLVEEDKKHERHPIFGNIVDEVAYHEKYPTIYHLRKKLVDSTDKADLRLIYLALAHMIKFRGHFLIEGDLNPDNSDVDKLFIQLVQTYNQLFEENPINASGVDAKAILSARLSKSRRLENLIAQLPGEKKNGLFGNLIALSLGLTPNFKSNFDLAEDAKLQLSKDTYDDDLDNLLAQIGDQYADLFLAAKNLSDAILLSDILRVNTEITKAPLSASMIKRYDEHHQDLTLLKALVRQQLPEKYKEIFFDQSKNGYAGYIDGGASQEEFYKFIKPILEKMDGTEELLVKLNREDLLRKQRTFDNGSIPHQIHLGELHAILRRQEDFYPFLKDNREKIEKILTFRIPYYVGPLARGNSRFAWMTRKSEETITPWNFEEVVDKGASAQSFIERMTNFDKNLPNEKVLPKHSLLYEYFTVYNELTKVKYVTEGMRKPAFLSGEQKKAIVDLLFKTNRKVTVKQLKEDYFKKIECFDSVEISGVEDRFNASLGTYHDLLKIIKDKDFLDNEENEDILEDIVLTLTLFEDREMIEERLKTYAHLFDDKVMKQLKRRRYTGWGRLSRKLINGIRDKQSGKTILDFLKSDGFANRNFMQLIHDDSLTFKEDIQKAQVSGQGDSLHEHIANLAGSPAIKKGILQTVKVVDELVKVMGRHKPENIVIEMARENQTTQKGQKNSRERMKRIEEGIKELGSQILKEHPVENTQLQNEKLYLYYLQNGRDMYVDQELDINRLSDYDVDHIVPQSFLKDDSIDNKVLTRSDKARGKSDNVPSEEVVKKMKNYWRQLLNAKLITQRKFDNLTKAERGGLSELDKAGFIKRQLVETRQITKHVAQILDSRMNTKYDENDKLIREVKVITLKSKLVSDFRKDFQFYKVREINNYHHAHDAYLNAVVGTALIKKYPKLESEFVYGDYKVYDVRKMIAKSEQEIGKATAKYFFYSNIMNFFKTEITLANGEIRKRPLIETNGETGEIVWDKGRDFATVRKVLSMPQVNIVKKTEVQTGGFSKESILPKRNSDKLIARKKDWDPKKYGGFDSPTVAYSVLVVAKVEKGKSKKLKSVKELLGITIMERSSFEKNPIDFLEAKGYKEVKKDLIIKLPKYSLFELENGRKRMLASAGELQKGNELALPSKYVNFLYLASHYEKLKGSPEDNEQKQLFVEQHKHYLDEIIEQISEFSKRVILADANLDKVLSAYNKHRDKPIREQAENIIHLFTLTNLGAPAAFKYFDTTIDRKRYTSTKEVLDATLIHQSITGLYETRIDLSQLGGDGGAEAAAKEAAAKEAAAKEAAAKALEAEAAAKEAAAKEAAAKEAAAKAGGTLNIEDEYRLHETSKGPDVPLGSTWLSDFPQAWAETGGMGLAFRQAPLIISLKATSTPVSIKQYPMSQEARLGIKPHIQRLLDQGILVPCQSPWNTPLLPVKKPGTNDYRPVQDLREVNKRVEDIHPTVPNPYNLLSGLPPSHQWYTVLDLKDAFFCLRLHPTSQSLFAFEWKDPEMGISGQLTWTRLPQGFKNSPTLFNEALHRDLADFRIQHPDLILLQYVDDLLLAATSELDCQQGTRALLQTLGDLGYRASAKKAQICQKQVKYLGYLLKEGQRWLTEARKETVMGQPTPKTPRQLREFLGKAGLCRLFIPGFAEMAAPLYPLTKPGTLFKWGPDQQKAYQEIKQALLTAPALGLPDLTKPFELFVDEKQGYAKGVLTQKLGPWRRPVAYLSKKLDPVAAGWPPCLRMVAAIAVLTKDVGKLTMGQPLVILAPHAVEALVKQPPDRWLSNARMTHYQALLLDTDRVQFGPIVALNPATLLPLPEEGLQHDCLDILAEAHGTRPDLTDQPLPDADHTWYTDGSSFLQEGQRRAGAAVTTETEVIWAKALPAGTSAQRAELIALTQALKMAAGKKLNVYTDSRYAFATAHIHGEIYRRRGWLTSEGKEIKNKDEILALLKALFLPKRLSIIHCPGHQKGNHAEARGNRMADQAAREVATRETPETSTLLAGKRTADGSEFEKRTADGSEFESPKKKAKVE

SEQ ID NO: 7660 - protein, 2131 aa, synthetic construct; identical to SEQ ID NO: 4540

SEQ ID NO: 7661 - protein, 2151 aa, synthetic construct
MPAAKRVKLDGGDKKYSIGLDIGTNSVGWAVITDEYKVPSKKFKVLGNTDRHSIKKNLIGALLFDSGETAEATRLKRTARRRYTRRKNRICYLQEIFSNEMAKVDDSFFHRLEESFLVEEDKKHERHPIFGNIVDEVAYHEKYPTIYHLRKKLVDSTDKADLRLIYLALAHMIKFRGHFLIEGDLNPDNSDVDKLFIQLVQTYNQLFEENPINASGVDAKAILSARLSKSRRLENLIAQLPGEKKNGLFGNLIALSLGLTPNFKSNFDLAEDAKLQLSKDTYDDDLDNLLAQIGDQYADLFLAAKNLSDAILLSDILRVNTEITKAPLSASMIKRYDEHHQDLTLLKALVRQQLPEKYKEIFFDQSKNGYAGYIDGGASQEEFYKFIKPILEKMDGTEELLVKLNREDLLRKQRTFDNGSIPHQIHLGELHAILRRQEDFYPFLKDNREKIEKILTFRIPYYVGPLARGNSRFAWMTRKSEETITPWNFEEVVDKGASAQSFIERMTNFDKNLPNEKVLPKHSLLYEYFTVYNELTKVKYVTEGMRKPAFLSGEQKKAIVDLLFKTNRKVTVKQLKEDYFKKIECFDSVEISGVEDRFNASLGTYHDLLKIIKDKDFLDNEENEDILEDIVLTLTLFEDREMIEERLKTYAHLFDDKVMKQLKRRRYTGWGRLSRKLINGIRDKQSGKTILDFLKSDGFANRNFMQLIHDDSLTFKEDIQKAQVSGQGDSLHEHIANLAGSPAIKKGILQTVKVVDELVKVMGRHKPENIVIEMARENQTTQKGQKNSRERMKRIEEGIKELGSQILKEHPVENTQLQNEKLYLYYLQNGRDMYVDQELDINRLSDYDVDHIVPQSFLKDDSIDNKVLTRSDKARGKSDNVPSEEVVKKMKNYWRQLLNAKLITQRKFDNLTKAERGGLSELDKAGFIKRQLVETRQITKHVAQILDSRMNTKYDENDKLIREVKVITLKSKLVSDFRKDFQFYKVREINNYHHAHDAYLNAVVGTALIKKYPKLESEFVYGDYKVYDVRKMIAKSEQEIGKATAKYFFYSNIMNFFKTEITLANGEIRKRPLIETNGETGEIVWDKGRDFATVRKVLSMPQVNIVKKTEVQTGGFSKESILPKRNSDKLIARKKDWDPKKYGGFDSPTVAYSVLVVAKVEKGKSKKLKSVKELLGITIMERSSFEKNPIDFLEAKGYKEVKKDLIIKLPKYSLFELENGRKRMLASAGELQKGNELALPSKYVNFLYLASHYEKLKGSPEDNEQKQLFVEQHKHYLDEIIEQISEFSKRVILADANLDKVLSAYNKHRDKPIREQAENIIHLFTLTNLGAPAAFKYFDTTIDRKRYTSTKEVLDATLIHQSITGLYETRIDLSQLGGDGGAEAAAKEAAAKEAAAKEAAAKALEAEAAAKEAAAKEAAAKEAAAKAGGWVQEISDSRPMLHIYLNGRRFLGLLNTGADKTCIAGRDWPANWPIHQTESSLQGLGMACGVARSSQPLRWQHEDKSGIIHPFVIPTLPFTLWGRDIMKDIKVRLMTDSPDDSQDLMIGAIESNLFADQISWKSDQPVWLNQWPLKQEKLQALQQLVTEQLQLGHLEESNSPWNTPVFVIKKKSGKWRLLQDLRAVNATMHDMGALQPGLPSPVAVPKGWEIIIIDLQDCFFNIKLHPEDCKRFAFSVPSPNFKRPYQRFQWKVLPQGMKNSPTLCQKFVDKAILTVRDKYQDSYIVHYMDDILLAHPSRSIVDEILTSMIQALNKHGLVVSTEKIQKYDNLKYLGTHIQGDSVSYQKLQIRTDKLRTLNDFQKLLGNINWIRPFLKLTTGELKPLFEILNPDSNPISTRKLTPEACKALQLMNERLSTARVKRLDLSQPWSLCILKTEYTPTACLWQDGVVEWIHLPHISPKVITPYDIFCTQLIIKGRHRSKELFSKDPDYIVVPYTKVQFDLLLQEKEDWPISLLGFLGEVHFHLPKDPLLTFTLQTAIIFPHMTSTTPLEKGIVIFTDGSANGRSVTYIQGREPIIKENTQNTAQQAEIVAVITAFEEVSQPFNLYTDSKYVTGLFPEIETATLSPRTKIYTELKHLQRLIHKRQEKFYIGHIRGHTGLPGPLAQGNAYADSLTRILTAGKRTADGSEFEKRTADGSEFESPKKKAKVE

SEQ ID NO: 7662 - protein, 2122 aa, synthetic construct
MPAAKRVKLDGGDKKYSIGLDIGTNSVGWAVITDEYKVPSKKFKVLGNTDRHSIKKNLIGALLFDSGETAEATRLKRTARRRYTRRKNRICYLQEIFSNEMAKVDDSFFHRLEESFLVEEDKKHERHPIFGNIVDEVAYHEKYPTIYHLRKKLVDSTDKADLRLIYLALAHMIKFRGHFLIEGDLNPDNSDVDKLFIQLVQTYNQLFEENPINASGVDAKAILSARLSKSRRLENLIAQLPGEKKNGLFGNLIALSLGLTPNFKSNFDLAEDAKLQLSKDTYDDDLDNLLAQIGDQYADLFLAAKNLSDAILLSDILRVNTEITKAPLSASMIKRYDEHHQDLTLLKALVRQQLPEKYKEIFFDQSKNGYAGYIDGGASQEEFYKFIKPILEKMDGTEELLVKLNREDLLRKQRTFDNGSIPHQIHLGELHAILRRQEDFYPFLKDNREKIEKILTFRIPYYVGPLARGNSRFAWMTRKSEETITPWNFEEVVDKGASAQSFIERMTNFDKNLPNEKVLPKHSLLYEYFTVYNELTKVKYVTEGMRKPAFLSGEQKKAIVDLLFKTNRKVTVKQLKEDYFKKIECFDSVEISGVEDRFNASLGTYHDLLKIIKDKDFLDNEENEDILEDIVLTLTLFEDREMIEERLKTYAHLFDDKVMKQLKRRRYTGWGRLSRKLINGIRDKQSGKTILDFLKSDGFANRNFMQLIHDDSLTFKEDIQKAQVSGQGDSLHEHIANLAGSPAIKKGILQTVKVVDELVKVMGRHKPENIVIEMARENQTTQKGQKNSRERMKRIEEGIKELGSQILKEHPVENTQLQNEKLYLYYLQNGRDMYVDQELDINRLSDYDVDHIVPQSFLKDDSIDNKVLTRSDKARGKSDNVPSEEVVKKMKNYWRQLLNAKLITQRKFDNLTKAERGGLSELDKAGFIKRQLVETRQITKHVAQILDSRMNTKYDENDKLIREVKVITLKSKLVSDFRKDFQFYKVREINNYHHAHDAYLNAVVGTALIKKYPKLESEFVYGDYKVYDVRKMIAKSEQEIGKATAKYFFYSNIMNFFKTEITLANGEIRKRPLIETNGETGEIVWDKGRDFATVRKVLSMPQVNIVKKTEVQTGGFSKESILPKRNSDKLIARKKDWDPKKYGGFDSPTVAYSVLVVAKVEKGKSKKLKSVKELLGITIMERSSFEKNPIDFLEAKGYKEVKKDLIIKLPKYSLFELENGRKRMLASAGELQKGNELALPSKYVNFLYLASHYEKLKGSPEDNEQKQLFVEQHKHYLDEIIEQISEFSKRVILADANLDKVLSAYNKHRDKPIREQAENIIHLFTLTNLGAPAAFKYFDTTIDRKRYTSTKEVLDATLIHQSITGLYETRIDLSQLGGDGGAEAAAKEAAAKEAAAKEAAAKALEAEAAAKEAAAKEAAAKEAAAKAGGVPWLMKKPLQLTVLVPLHEYQERLLQQTALPKEQKELLQKLFLKYDALWQHWENQVGHRRIKPHNIATGTLAPRPQKQYPINPKAKPSIQIVIDDLLKQGVLIQQNSTMNTPVYPVPKPDGKWRMVLDYREVNKTIPLIAAQNQHSAGILSSIYRGKYKTTLDLTNGFWAHPITPESYWLTAFTWQGKQYCWTRLPQGFLNSPALFTADVVDLLKEIPNVQAYVDDIYISHDDPQEHLEQLEKIFSILLNAGYVVSLKKSEIAQREVEFLGFNITKEGRGLTDTFKQKLLNITPPKDLKQLQSILGLLNFARNFIPNYSELVKPLYTIVANANGKFISWTEDNSNQLQHIISVLNQADNLEERNPETRLIIKVNSSPSAGYIRYYNEGSKRPIMYVNYIFSKAEAKFTQTEKLLTTMHKGLIKAMDLAMGQEILVYSPIVSMTKIQRTPLPERKALPVRWITWMTYLEDPRIQFHYDKSLPELQQIPNVTEDVIAKTKHPSEFAMVFYTDGSAIKHPDVNKSHSAGMGIAQVQFIPEYKIVHQWSIPLGDHTAQLAEIAAVEFACKKALKISGPVLIVTDSFYVAESANKELPYWKSNGFLNNKKKPLRHVSKWKSIAECLQLKPDIIIMHEKGHQQPMTTLHTEGNNLADKLATQGSYVVHAGKRTADGSEFEKRTADGSEFESPKKKAKVE

SEQ ID NO: 7663 - protein, 2122 aa, synthetic construct
MPAAKRVKLDGGDKKYSIGLDIGTNSVGWAVITDEYKVPSKKFKVLGNTDRHSIKKNLIGALLFDSGETAEATRLKRTARRRYTRRKNRICYLQEIFSNEMAKVDDSFFHRLEESFLVEEDKKHERHPIFGNIVDEVAYHEKYPTIYHLRKKLVDSTDKADLRLIYLALAHMIKFRGHFLIEGDLNPDNSDVDKLFIQLVQTYNQLFEENPINASGVDAKAILSARLSKSRRLENLIAQLPGEKKNGLFGNLIALSLGLTPNFKSNFDLAEDAKLQLSKDTYDDDLDNLLAQIGDQYADLFLAAKNLSDAILLSDILRVNTEITKAPLSASMIKRYDEHHQDLTLLKALVRQQLPEKYKEIFFDQSKNGYAGYIDGGASQEEFYKFIKPILEKMDGTEELLVKLNREDLLRKQRTFDNGSIPHQIHLGELHAILRRQEDFYPFLKDNREKIEKILTFRIPYYVGPLARGNSRFAWMTRKSEETITPWNFEEVVDKGASAQSFIERMTNFDKNLPNEKVLPKHSLLYEYFTVYNELTKVKYVTEGMRKPAFLSGEQKKAIVDLLFKTNRKVTVKQLKEDYFKKIECFDSVEISGVEDRFNASLGTYHDLLKIIKDKDFLDNEENEDILEDIVLTLTLFEDREMIEERLKTYAHLFDDKVMKQLKRRRYTGWGRLSRKLINGIRDKQSGKTILDFLKSDGFANRNFMQLIHDDSLTFKEDIQKAQVSGQGDSLHEHIANLAGSPAIKKGILQTVKVVDELVKVMGRHKPENIVIEMARENQTTQKGQKNSRERMKRIEEGIKELGSQILKEHPVENTQLQNEKLYLYYLQNGRDMYVDQELDINRLSDYDVDHIVPQSFLKDDSIDNKVLTRSDKARGKSDNVPSEEVVKKMKNYWRQLLNAKLITQRKFDNLTKAERGGLSELDKAGFIKRQLVETRQITKHVAQILDSRMNTKYDENDKLIREVKVITLKSKLVSDFRKDFQFYKVREINNYHHAHDAYLNAVVGTALIKKYPKLESEFVYGDYKVYDVRKMIAKSEQEIGKATAKYFFYSNIMNFFKTEITLANGEIRKRPLIETNGETGEIVWDKGRDFATVRKVLSMPQVNIVKKTEVQTGGFSKESILPKRNSDKLIARKKDWDPKKYGGFDSPTVAYSVLVVAKVEKGKSKKLKSVKELLGITIMERSSFEKNPIDFLEAKGYKEVKKDLIIKLPKYSLFELENGRKRMLASAGELQKGNELALPSKYVNFLYLASHYEKLKGSPEDNEQKQLFVEQHKHYLDEIIEQISEFSKRVILADANLDKVLSAYNKHRDKPIREQAENIIHLFTLTNLGAPAAFKYFDTTIDRKRYTSTKEVLDATLIHQSITGLYETRIDLSQLGGDGGAEAAAKEAAAKEAAAKEAAAKALEAEAAAKEAAAKEAAAKEAAAKAGGVPWLMKKPLQLTVLVPLHEYQERLLQQTALPKEQKELLQKLFLKYDALWQHWENQVGHRRIKPHNIATGTLAPRPQKQYPINPKAKPSIQIVIDDLLKQGVLIQQNSTMNTPVYPVPKPDGKWRMVLDYREVNKTIPLIAAQNQHSAGILSSIYRGKYKTTLDLTNGFWAHPITPESYWLTAFTWQGKQYCWTRLPQGFLNSPALFNADVVDLLKEIPNVQAYVDDIYISHDDPQEHLEQLEKIFSILLNAGYVVSLKKSEIAQREVEFLGFNITKEGRGLTDTFKQKLLNITPPKDLKQLQSILGLLNFARNFIPNYSELVKPLYTIVAPANGKFISWTEDNSNQLQHIISVLNQADNLEERNPETRLIIKVNSSPSAGYIRYYNEGSKRPIMYVNYIFSKAEAKFTQTEKLLTTMHKGLIKAMDLAMGQEILVYSPIVSMTKIQRTPLPERKALPVRWITWMTYLEDPRIQFHYDKSLPELQQIPNVTEDVIAKTKHPSEFAMVFYTDGSAIKHPDVNKSHSAGMGIAQVQFIPEYKIVHQWSIPLGDHTAQLAEIAAVEFACKKALKISGPVLIVTDSFYVAESANKELPYWKSNGFLNNKKKPLRHVSKWKSIAECLQLKPDIIIMHEKGHQQPMTTLHTEGNNLADKLATQGSYVVHAGKRTADGSEFEKRTADGSEFESPKKKAKVE

SEQ ID NO: 7664 - protein, 2122 aa, synthetic construct
MPAAKRVKLDGGDKKYSIGLDIGTNSVGWAVITDEYKVPSKKFKVLGNTDRHSIKKNLIGALLFDSGETAEATRLKRTARRRYTRRKNRICYLQEIFSNEMAKVDDSFFHRLEESFLVEEDKKHERHPIFGNIVDEVAYHEKYPTIYHLRKKLVDSTDKADLRLIYLALAHMIKFRGHFLIEGDLNPDNSDVDKLFIQLVQTYNQLFEENPINASGVDAKAILSARLSKSRRLENLIAQLPGEKKNGLFGNLIALSLGLTPNFKSNFDLAEDAKLQLSKDTYDDDLDNLLAQIGDQYADLFLAAKNLSDAILLSDILRVNTEITKAPLSASMIKRYDEHHQDLTLLKALVRQQLPEKYKEIFFDQSKNGYAGYIDGGASQEEFYKFIKPILEKMDGTEELLVKLNREDLLRKQRTFDNGSIPHQIHLGELHAILRRQEDFYPFLKDNREKIEKILTFRIPYYVGPLARGNSRFAWMTRKSEETITPWNFEEVVDKGASAQSFIERMTNFDKNLPNEKVLPKHSLLYEYFTVYNELTKVKYVTEGMRKPAFLSGEQKKAIVDLLFKTNRKVTVKQLKEDYFKKIECFDSVEISGVEDRFNASLGTYHDLLKIIKDKDFLDNEENEDILEDIVLTLTLFEDREMIEERLKTYAHLFDDKVMKQLKRRRYTGWGRLSRKLINGIRDKQSGKTILDFLKSDGFANRNFMQLIHDDSLTFKEDIQKAQVSGQGDSLHEHIANLAGSPAIKKGILQTVKVVDELVKVMGRHKPENIVIEMARENQTTQKGQKNSRERMKRIEEGIKELGSQILKEHPVENTQLQNEKLYLYYLQNGRDMYVDQELDINRLSDYDVDHIVPQSFLKDDSIDNKVLTRSDKARGKSDNVPSEEVVKKMKNYWRQLLNAKLITQRKFDNLTKAERGGLSELDKAGFIKRQLVETRQITKHVAQILDSRMNTKYDENDKLIREVKVITLKSKLVSDFRKDFQFYKVREINNYHHAHDAYLNAVVGTALIKKYPKLESEFVYGDYKVYDVRKMIAKSEQEIGKATAKYFFYSNIMNFFKTEITLANGEIRKRPLIETNGETGEIVWDKGRDFATVRKVLSMPQVNIVKKTEVQTGGFSKESILPKRNSDKLIARKKDWDPKKYGGFDSPTVAYSVLVVAKVEKGKSKKLKSVKELLGITIMERSSFEKNPIDFLEAKGYKEVKKDLIIKLPKYSLFELENGRKRMLASAGELQKGNELALPSKYVNFLYLASHYEKLKGSPEDNEQKQLFVEQHKHYLDEIIEQISEFSKRVILADANLDKVLSAYNKHRDKPIREQAENIIHLFTLTNLGAPAAFKYFDTTIDRKRYTSTKEVLDATLIHQSITGLYETRIDLSQLGGDGGAEAAAKEAAAKEAAAKEAAAKALEAEAAAKEAAAKEAAAKEAAAKAGGVPWLMKKPLQLTVLVPLHEYQERLLQQTALPKEQKELLQKLFLKYDALWQHWENQVGHRRIKPHNIATGTLAPRPQKQYPINPKAKPSIQIVIDDLLKQGVLIQQNSTMNTPVYPVPKPDGKWRMVLDYREVNKTIPLIAAQNQHSAGILSSIYRGKYKTTLDLTNGFWAHPITPESYWLTAFTWQGKQYCWTRLPQGFLNSPALFNADVVDLLKEIPNVQAYVDDIYISHDDPQEHLEQLEKIFSILLNAGYVVSLKKSEIAQREVEFLGFNITKEGRGLTDTFKQKLLNITPPKDLKQLQSILGKLNFARNFIPNYSELVKPLYTIVAPANGKFISWTEDNSNQLQHIISVLNQADNLEERNPETRLIIKVNSSPSAGYIRYYNEGSKRPIMYVNYIFSKAEAKFTQTEKLLTTMHKGLIKAMDLAMGQEILVYSPIVSMTKIQRTPLPERKALPVRWITWMTYLEDPRIQFHYDKSLPELQQIPNVTEDVIAKTKHPSEFAMVFYTDGSAIKHPDVNKSHSAGMGIAQVQFIPEYKIVHQWSIPLGDHTAQLAEIAAVEFACKKALKISGPVLIVTDSFYVAESANKELPYWKSNGFLNNKKKPLRHVSKWKSIAECLQLKPDIIIMHEKGHQQPMTTLHTEGNNLADKLATQGSYVVHAGKRTADGSEFEKRTADGSEFESPKKKAKVE

SEQ ID NO: 7665 - protein, 2211 aa, synthetic construct
MPAAKRVKLDGGDKKYSIGLDIGTNSVGWAVITDEYKVPSKKFKVLGNTDRHSIKKNLIGALLFDSGETAEATRLKRTARRRYTRRKNRICYLQEIFSNEMAKVDDSFFHRLEESFLVEEDKKHERHPIFGNIVDEVAYHEKYPTIYHLRKKLVDSTDKADLRLIYLALAHMIKFRGHFLIEGDLNPDNSDVDKLFIQLVQTYNQLFEENPINASGVDAKAILSARLSKSRRLENLIAQLPGEKKNGLFGNLIALSLGLTPNFKSNFDLAEDAKLQLSKDTYDDDLDNLLAQIGDQYADLFLAAKNLSDAILLSDILRVNTEITKAPLSASMIKRYDEHHQDLTLLKALVRQQLPEKYKEIFFDQSKNGYAGYIDGGASQEEFYKFIKPILEKMDGTEELLVKLNREDLLRKQRTFDNGSIPHQIHLGELHAILRRQEDFYPFLKDNREKIEKILTFRIPYYVGPLARGNSRFAWMTRKSEETITPWNFEEVVDKGASAQSFIERMTNFDKNLPNEKVLPKHSLLYEYFTVYNELTKVKYVTEGMRKPAFLSGEQKKAIVDLLFKTNRKVTVKQLKEDYFKKIECFDSVEISGVEDRFNASLGTYHDLLKIIKDKDFLDNEENEDILEDIVLTLTLFEDREMIEERLKTYAHLFDDKVMKQLKRRRYTGWGRLSRKLINGIRDKQSGKTILDFLKSDGFANRNFMQLIHDDSLTFKEDIQKAQVSGQGDSLHEHIANLAGSPAIKKGILQTVKVVDELVKVMGRHKPENIVIEMARENQTTQKGQKNSRERMKRIEEGIKELGSQILKEHPVENTQLQNEKLYLYYLQNGRDMYVDQELDINRLSDYDVDHIVPQSFLKDDSIDNKVLTRSDKARGKSDNVPSEEVVKKMKNYWRQLLNAKLITQRKFDNLTKAERGGLSELDKAGFIKRQLVETRQITKHVAQILDSRMNTKYDENDKLIREVKVITLKSKLVSDFRKDFQFYKVREINNYHHAHDAYLNAVVGTALIKKYPKLESEFVYGDYKVYDVRKMIAKSEQEIGKATAKYFFYSNIMNFFKTEITLANGEIRKRPLIETNGETGEIVWDKGRDFATVRKVLSMPQVNIVKKTEVQTGGFSKESILPKRNSDKLIARKKDWDPKKYGGFDSPTVAYSVLVVAKVEKGKSKKLKSVKELLGITIMERSSFEKNPIDFLEAKGYKEVKKDLIIKLPKYSLFELENGRKRMLASAGELQKGNELALPSKYVNFLYLASHYEKLKGSPEDNEQKQLFVEQHKHYLDEIIEQISEFSKRVILADANLDKVLSAYNKHRDKPIREQAENIIHLFTLTNLGAPAAFKYFDTTIDRKRYTSTKEVLDATLIHQSITGLYETRIDLSQLGGDGGAEAAAKEAAAKEAAAKEAAAKALEAEAAAKEAAAKEAAAKEAAAKAGGMDPLQLLQPLEAEIKGTKLKAHWNSGATITCVPEAFLEDERPIQTMLIKTIHGEKQQDVYYLTFKVQGRKVEAEVLASPYDYILLNPSDVPWLMKKPLQLTVLVPLHEYQERLLQQTALPKEQKELLQKLFLKYDALWQHWENQVGHRRIKPHNIATGTLAPRPQKQYPINPKAKPSIQIVIDDLLKQGVLIQQNSTMNTPVYPVPKPDGKWRMVLDYREVNKTIPLIAAQNQHSAGILSSIYRGKYKTTLDLTNGFWAHPITPESYWLTAFTWQGKQYCWTRLPQGFLNSPALFNADVVDLLKEIPNVQAYVDDIYISHDDPQEHLEQLEKIFSILLNAGYVVSLKKSEIAQREVEFLGFNITKEGRGLTDTFKQKLLNITPPKDLKQLQSILGLLNFARNFIPNYSELVKPLYTIVAPANGKFISWTEDNSNQLQHIISVLNQADNLEERNPETRLIIKVNSSPSAGYIRYYNEGSKRPIMYVNYIFSKAEAKFTQTEKLLTTMHKGLIKAMDLAMGQEILVYSPIVSMTKIQRTPLPERKALPVRWITWMTYLEDPRIQFHYDKSLPELQQIPNVTEDVIAKTKHPSEFAMVFYTDGSAIKHPDVNKSHSAGMGIAQVQFIPEYKIVHQWSIPLGDHTAQLAEIAAVEFACKKALKISGPVLIVTDSFYVAESANKELPYWKSNGFLNNKKKPLRHVSKWKSIAECLQLKPDIIIMHEKGHQQPMTTLHTEGNNLADKLATQGSYVVHAGKRTADGSEFEKRTADGSEFESPKKKAKVE

SEQ ID NO: 7666 - protein, 2122 aa, synthetic construct
MPAAKRVKLDGGDKKYSIGLDIGTNSVGWAVITDEYKVPSKKFKVLGNTDRHSIKKNLIGALLFDSGETAEATRLKRTARRRYTRRKNRICYLQEIFSNEMAKVDDSFFHRLEESFLVEEDKKHERHPIFGNIVDEVAYHEKYPTIYHLRKKLVDSTDKADLRLIYLALAHMIKFRGHFLIEGDLNPDNSDVDKLFIQLVQTYNQLFEENPINASGVDAKAILSARLSKSRRLENLIAQLPGEKKNGLFGNLIALSLGLTPNFKSNFDLAEDAKLQLSKDTYDDDLDNLLAQIGDQYADLFLAAKNLSDAILLSDILRVNTEITKAPLSASMIKRYDEHHQDLTLLKALVRQQLPEKYKEIFFDQSKNGYAGYIDGGASQEEFYKFIKPILEKMDGTEELLVKLNREDLLRKQRTFDNGSIPHQIHLGELHAILRRQEDFYPFLKDNREKIEKILTFRIPYYVGPLARGNSRFAWMTRKSEETITPWNFEEVVDKGASAQSFIERMTNFDKNLPNEKVLPKHSLLYEYFTVYNELTKVKYVTEGMRKPAFLSGEQKKAIVDLLFKTNRKVTVKQLKEDYFKKIECFDSVEISGVEDRFNASLGTYHDLLKIIKDKDFLDNEENEDILEDIVLTLTLFEDREMIEERLKTYAHLFDDKVMKQLKRRRYTGWGRLSRKLINGIRDKQSGKTILDFLKSDGFANRNFMQLIHDDSLTFKEDIQKAQVSGQGDSLHEHIANLAGSPAIKKGILQTVKVVDELVKVMGRHKPENIVIEMARENQTTQKGQKNSRERMKRIEEGIKELGSQILKEHPVENTQLQNEKLYLYYLQNGRDMYVDQELDINRLSDYDVDHIVPQSFLKDDSIDNKVLTRSDKARGKSDNVPSEEVVKKMKNYWRQLLNAKLITQRKFDNLTKAERGGLSELDKAGFIKRQLVETRQITKHVAQILDSRMNTKYDENDKLIREVKVITLKSKLVSDFRKDFQFYKVREINNYHHAHDAYLNAVVGTALIKKYPKLESEFVYGDYKVYDVRKMIAKSEQEIGKATAKYFFYSNIMNFFKTEITLANGEIRKRPLIETNGETGEIVWDKGRDFATVRKVLSMPQVNIVKKTEVQTGGFSKESILPKRNSDKLIARKKDWDPKKYGGFDSPTVAYSVLVVAKVEKGKSKKLKSVKELLGITIMERSSFEKNPIDFLEAKGYKEVKKDLIIKLPKYSLFELENGRKRMLASAGELQKGNELALPSKYVNFLYLASHYEKLKGSPEDNEQKQLFVEQHKHYLDEIIEQISEFSKRVILADANLDKVLSAYNKHRDKPIREQAENIIHLFTLTNLGAPAAFKYFDTTIDRKRYTSTKEVLDATLIHQSITGLYETRIDLSQLGGDGGAEAAAKEAAAKEAAAKEAAAKALEAEAAAKEAAAKEAAAKEAAAKAGGIPWLMKKPLQLTTLVPLQEYEERLLKQTMLTGSYKEKLQSLFLKYDALWQHWENQVGHRRIKPHHIATGTVNPRPQKQYPINPKAKASIQTVINDLLKQGVLIQQNSIMNTPVYPVPKPDGKWRMVLDYREVNKTIPLIAAQNQHSAGILSSIFRGKYKTTLDLSNGFWAHSITPESYWLTAFTWLGQQYCWTRLPQGFLNSPALFNADVVDLLKEVPNVQVYVDDIYISHDDPREHLEQLEKVFSLLLNAGYVVSLKKSEIAQHEVEFLGFNITKEGRGLTETFKQKLLNITPPRDLKQLQSILGLLNFARNFIPNFSELVKPLYNIIATAPGKYITWTTDNSQQLQNIISMLNSAENLEERNPEVRLIMKVNTSPSAGYIRFYNEFAKRPIMYLNYVYTKAEVKFTNTEKLLTTIHKGLIKALDLGMGQEILVYSPIVSMTKIQKTPLPERKALPIRWITWMSYLEDPRIQFHYDKTLPELQQVPTVTDDIIAKIKHPSEFSMVFYTDGSAIKHPNVNKSHNAGMGIAQVQFKPEFTVINTWSIPLGDHTAQLAEVAAVEFACKKALKIDGPVLIVTDSFYVAESVNKELPYWQSNGFFNNKKKPLKHVSKWKSIADCIQLKPDIIIIHEKGHQPTASTFHTEGNNLADKLATQGSYVVNAGKRTADGSEFEKRTADGSEFESPKKKAKVE

SEQ ID NO: 7667 - protein, 2122 aa, synthetic construct; identical to SEQ ID NO: 4541

SEQ ID NO: 7668 - protein, 2102 aa, synthetic construct
MPAAKRVKLDGGDKKYSIGLDIGTNSVGWAVITDEYKVPSKKFKVLGNTDRHSIKKNLIGALLFDSGETAEATRLKRTARRRYTRRKNRICYLQEIFSNEMAKVDDSFFHRLEESFLVEEDKKHERHPIFGNIVDEVAYHEKYPTIYHLRKKLVDSTDKADLRLIYLALAHMIKFRGHFLIEGDLNPDNSDVDKLFIQLVQTYNQLFEENPINASGVDAKAILSARLSKSRRLENLIAQLPGEKKNGLFGNLIALSLGLTPNFKSNFDLAEDAKLQLSKDTYDDDLDNLLAQIGDQYADLFLAAKNLSDAILLSDILRVNTEITKAPLSASMIKRYDEHHQDLTLLKALVRQQLPEKYKEIFFDQSKNGYAGYIDGGASQEEFYKFIKPILEKMDGTEELLVKLNREDLLRKQRTFDNGSIPHQIHLGELHAILRRQEDFYPFLKDNREKIEKILTFRIPYYVGPLARGNSRFAWMTRKSEETITPWNFEEVVDKGASAQSFIERMTNFDKNLPNEKVLPKHSLLYEYFTVYNELTKVKYVTEGMRKPAFLSGEQKKAIVDLLFKTNRKVTVKQLKEDYFKKIECFDSVEISGVEDRFNASLGTYHDLLKIIKDKDFLDNEENEDILEDIVLTLTLFEDREMIEERLKTYAHLFDDKVMKQLKRRRYTGWGRLSRKLINGIRDKQSGKTILDFLKSDGFANRNFMQLIHDDSLTFKEDIQKAQVSGQGDSLHEHIANLAGSPAIKKGILQTVKVVDELVKVMGRHKPENIVIEMARENQTTQKGQKNSRERMKRIEEGIKELGSQILKEHPVENTQLQNEKLYLYYLQNGRDMYVDQELDINRLSDYDVDHIVPQSFLKDDSIDNKVLTRSDKARGKSDNVPSEEVVKKMKNYWRQLLNAKLITQRKFDNLTKAERGGLSELDKAGFIKRQLVETRQITKHVAQILDSRMNTKYDENDKLIREVKVITLKSKLVSDFRKDFQFYKVREINNYHHAHDAYLNAVVGTALIKKYPKLESEFVYGDYKVYDVRKMIAKSEQEIGKATAKYFFYSNIMNFFKTEITLANGEIRKRPLIETNGETGEIVWDKGRDFATVRKVLSMPQVNIVKKTEVQTGGFSKESILPKRNSDKLIARKKDWDPKKYGGFDSPTVAYSVLVVAKVEKGKSKKLKSVKELLGITIMERSSFEKNPIDFLEAKGYKEVKKDLIIKLPKYSLFELENGRKRMLASAGELQKGNELALPSKYVNFLYLASHYEKLKGSPEDNEQKQLFVEQHKHYLDEIIEQISEFSKRVILADANLDKVLSAYNKHRDKPIREQAENIIHLFTLTNLGAPAAFKYFDTTIDRKRYTSTKEVLDATLIHQSITGLYETRIDLSQLGGDGGGGGGSEAAAKGGGGSGGTAPLEEEYRLFLEAPIQNVTLLEQWKREIPKVWAEINPPGLASTQAPIHVQLLSTALPVRVRQYPITLEAKRSLRETIRKFRAAGILRPVHSPWNTPLLPVRKSGTSEYRMVQDLREVNKRVETIHPTVPNPYTLLSLLPPDRIWYSVLDLKDAFFCIPLAPESQLIFAFEWADAEEGESGQLTWTRLPQGFKNSPTLFDEALNRDLQGFRLDHPSVSLLQYVDDLLIAADTQAACLSATRDLLMTLAELGYRVSGKKAQLCQEEVTYLGFKIHKGSRSLSNSRTQAILQIPVPKTKRQVREFLGTIGYCRLWIPGFAELAQPLYAATRGGNDPLVWGEKEEEAFQSLKLALTQPPALALPSLDKPFQLFVEETSGAAKGVLTQALGPWKRPVAYLSKRLDPVAAGWPRCLRAIAAAALLTREASKLTFGQDIEITSSHNLESLLRSPPDKWLTNARITQYQVLLLDPPRVRFKQTAALNPATLLPETDDTLPIHHCLDTLDSLTSTRPDLTDQPLAQAEATLFTDGSSYIRDGKRYAGAAVVTLDSVIWAEPLPIGTSAQKAELIALTKALEWSKDKSVNIYTDSRYAFATLHVHGMIYRERGLLTAGGKAIKNAPEILALLTAVWLPKRVAVMHCKGHQKDDAPTSTGNRRADEVAREVAIRPLSTQATISAGKRTADGSEFEKRTADGSEFESPKKKAKVE

SEQ ID NO: 7669 - protein, 2177 aa, synthetic construct
MPAAKRVKLDGGDKKYSIGLDIGTNSVGWAVITDEYKVPSKKFKVLGNTDRHSIKKNLIGALLFDSGETAEATRLKRTARRRYTRRKNRICYLQEIFSNEMAKVDDSFFHRLEESFLVEEDKKHERHPIFGNIVDEVAYHEKYPTIYHLRKKLVDSTDKADLRLIYLALAHMIKFRGHFLIEGDLNPDNSDVDKLFIQLVQTYNQLFEENPINASGVDAKAILSARLSKSRRLENLIAQLPGEKKNGLFGNLIALSLGLTPNFKSNFDLAEDAKLQLSKDTYDDDLDNLLAQIGDQYADLFLAAKNLSDAILLSDILRVNTEITKAPLSASMIKRYDEHHQDLTLLKALVRQQLPEKYKEIFFDQSKNGYAGYIDGGASQEEFYKFIKPILEKMDGTEELLVKLNREDLLRKQRTFDNGSIPHQIHLGELHAILRRQEDFYPFLKDNREKIEKILTFRIPYYVGPLARGNSRFAWMTRKSEETITPWNFEEVVDKGASAQSFIERMTNFDKNLPNEKVLPKHSLLYEYFTVYNELTKVKYVTEGMRKPAFLSGEQKKAIVDLLFKTNRKVTVKQLKEDYFKKIECFDSVEISGVEDRFNASLGTYHDLLKIIKDKDFLDNEENEDILEDIVLTLTLFEDREMIEERLKTYAHLFDDKVMKQLKRRRYTGWGRLSRKLINGIRDKQSGKTILDFLKSDGFANRNFMQLIHDDSLTFKEDIQKAQVSGQGDSLHEHIANLAGSPAIKKGILQTVKVVDELVKVMGRHKPENIVIEMARENQTTQKGQKNSRERMKRIEEGIKELGSQILKEHPVENTQLQNEKLYLYYLQNGRDMYVDQELDINRLSDYDVDHIVPQSFLKDDSIDNKVLTRSDKARGKSDNVPSEEVVKKMKNYWRQLLNAKLITQRKFDNLTKAERGGLSELDKAGFIKRQLVETRQITKHVAQILDSRMNTKYDENDKLIREVKVITLKSKLVSDFRKDFQFYKVREINNYHHAHDAYLNAVVGTALIKKYPKLESEFVYGDYKVYDVRKMIAKSEQEIGKATAKYFFYSNIMNFFKTEITLANGEIRKRPLIETNGETGEIVWDKGRDFATVRKVLSMPQVNIVKKTEVQTGGFSKESILPKRNSDKLIARKKDWDPKKYGGFDSPTVAYSVLVVAKVEKGKSKKLKSVKELLGITIMERSSFEKNPIDFLEAKGYKEVKKDLIIKLPKYSLFELENGRKRMLASAGELQKGNELALPSKYVNFLYLASHYEKLKGSPEDNEQKQLFVEQHKHYLDEIIEQISEFSKRVILADANLDKVLSAYNKHRDKPIREQAENIIHLFTLTNLGAPAAFKYFDTTIDRKRYTSTKEVLDATLIHQSITGLYETRIDLSQLGGDGGGGGGSEAAAKGGGGSGGMDLLKPLTVERKGVKIKGYWNSQADITCVPKDLLQGEEPVRQQNVTTIHGTQEGDVYYVNLKIDGRRINTEVIGTTLDYAIITPGDVPWILKKPLELTIKLDLEEQQGTLLNNSILSKKGKEELKQLFEKYSALWQSWENQVGHRRIRPHKIATGTVKPTPQKQYHINPKAKPDIQIVINDLLKQGVLIQKESTMNTPVYPVPKPNGRWRMVLDYRAVNKVTPLIAVQNQHSYGILGSLFKGRYKTTIDLSNGFWAHPIVPEDYWITAFTWQGKQYCWTVLPQGFLNSPGLFNGDVVDLLQGIPNVEVYVDDVYISHDSEKEHLEYLDILFNRLKEAGYIISLKKSNIANSIVDFLGFQITNEGRGLTDTFKEKLENITAPTTLKQLQSILGLLNFARNFIPDFTELIAPLYALIPKSPKNYVPWQIEHSTTLETLITKLNGAEYLQGRKGDKTLIMKVNASYTTGYIRYYNEGEKKPISYVSIVFSKTELKFTELEKLLTTVHKGLLKALDLSMGQNIHVYSPIVSMQNIQKTPQTAKKALASRWLSWLSYLEDPRIRFFYDPQMPALKDLPAVDTGKDNKKHPSNFQHIFYTDGSAITSPTKEGHLNAGMGIVYFINKDGNLQKQQEWSISLGNHTAQFAEIAAFEFALKKCLPLGGNILVVTDSNYVAKAYNEELDVWASNGFVNNRKKPLKHISKWKSVADLKRLRPDVVVTHEPGHQKLDSSPHAYGNNLADQLATQASFKVHAGKRTADGSEFEKRTADGSEFESPKKKAKVE

SEQ ID NO: 7670 - protein, 2099 aa, synthetic construct
MPAAKRVKLDGGDKKYSIGLDIGTNSVGWAVITDEYKVPSKKFKVLGNTDRHSIKKNLIGALLFDSGETAEATRLKRTARRRYTRRKNRICYLQEIFSNEMAKVDDSFFHRLEESFLVEEDKKHERHPIFGNIVDEVAYHEKYPTIYHLRKKLVDSTDKADLRLIYLALAHMIKFRGHFLIEGDLNPDNSDVDKLFIQLVQTYNQLFEENPINASGVDAKAILSARLSKSRRLENLIAQLPGEKKNGLFGNLIALSLGLTPNFKSNFDLAEDAKLQLSKDTYDDDLDNLLAQIGDQYADLFLAAKNLSDAILLSDILRVNTEITKAPLSASMIKRYDEHHQDLTLLKALVRQQLPEKYKEIFFDQSKNGYAGYIDGGASQEEFYKFIKPILEKMDGTEELLVKLNREDLLRKQRTFDNGSIPHQIHLGELHAILRRQEDFYPFLKDNREKIEKILTFRIPYYVGPLARGNSRFAWMTRKSEETITPWNFEEVVDKGASAQSFIERMTNFDKNLPNEKVLPKHSLLYEYFTVYNELTKVKYVTEGMRKPAFLSGEQKKAIVDLLFKTNRKVTVKQLKEDYFKKIECFDSVEISGVEDRFNASLGTYHDLLKIIKDKDFLDNEENEDILEDIVLTLTLFEDREMIEERLKTYAHLFDDKVMKQLKRRRYTGWGRLSRKLINGIRDKQSGKTILDFLKSDGFANRNFMQLIHDDSLTFKEDIQKAQVSGQGDSLHEHIANLAGSPAIKKGILQTVKVVDELVKVMGRHKPENIVIEMARENQTTQKGQKNSRERMKRIEEGIKELGSQILKEHPVENTQLQNEKLYLYYLQNGRDMYVDQELDINRLSDYDVDHIVPQSFLKDDSIDNKVLTRSDKARGKSDNVPSEEVVKKMKNYWRQLLNAKLITQRKFDNLTKAERGGLSELDKAGFIKRQLVETRQITKHVAQILDSRMNTKYDENDKLIREVKVITLKSKLVSDFRKDFQFYKVREINNYHHAHDAYLNAVVGTALIKKYPKLESEFVYGDYKVYDVRKMIAKSEQEIGKATAKYFFYSNIMNFFKTEITLANGEIRKRPLIETNGETGEIVWDKGRDFATVRKVLSMPQVNIVKKTEVQTGGFSKESILPKRNSDKLIARKKDWDPKKYGGFDSPTVAYSVLVVAKVEKGKSKKLKSVKELLGITIMERSSFEKNPIDFLEAKGYKEVKKDLIIKLPKYSLFELENGRKRMLASAGELQKGNELALPSKYVNFLYLASHYEKLKGSPEDNEQKQLFVEQHKHYLDEIIEQISEFSKRVILADANLDKVLSAYNKHRDKPIREQAENIIHLFTLTNLGAPAAFKYFDTTIDRKRYTSTKEVLDATLIHQSITGLYETRIDLSQLGGDGGGGGGSEAAAKGGGGSGGTLQLEEEYRLFEPESTQKQEMDIWLKNFPQAWAETGGMGTAHCQAPVLIQLKATATPISIRQYPMPHEAYQGIKPHIRRMLDQGILKPCQSPWNTPLLPVKKPGTEDYRPVQDLREVNKRVEDIHPTVPNPYNLLSTLPPSHPWYTVLDLKDAFFCLRLHSESQLLFAFEWRDPEIGLSGQLTWTRLPQGFKNSPTLFNEALHSDLADFRVRYPALVLLQYVDDLLLAAATRTECLEGTKALLETLGNKGYRASAKKAQICLQEVTYLGYSLKDGQRWLTKARKEAILSIPVPKNSRQVREFLGTAGYCRLWIPGFAELAAPLYPLTRPGTLFQWGTEQQLAFEDIKKALLSSPALGLPDITKPFELFIDENSGFAKGVLVQKLGPWKRPVAYLSKKLDTVASGWPPCLRMVAAIAILVKDAGKLTLGQPLTILTSHPVEALVRQPPNKWLSNARMTHYQAMLLDAERVHFGPTVSLNPATLLPLPSGGNHHDCLQILAETHGTRPDLTDQPLPDADLTWYTDGSSFIRNGEREAGAAVTTESEVIWAAPLPPGTSAQRAELIALTQALKMAEGKKLTVYTDSRYAFATTHVHGEIYRRRGWLTSEGKEIKNKNEILALLEALFLPKRLSIIHCPGHQKGDSPQAKGNRLADDTAKKAATETHSSLTVLPAGKRTADGSEFEKRTADGSEFESPKKKAKVE

SEQ ID NO: 7671 - protein, 2180 aa, synthetic construct
MPAAKRVKLDGGDKKYSIGLDIGTNSVGWAVITDEYKVPSKKFKVLGNTDRHSIKKNLIGALLFDSGETAEATRLKRTARRRYTRRKNRICYLQEIFSNEMAKVDDSFFHRLEESFLVEEDKKHERHPIFGNIVDEVAYHEKYPTIYHLRKKLVDSTDKADLRLIYLALAHMIKFRGHFLIEGDLNPDNSDVDKLFIQLVQTYNQLFEENPINASGVDAKAILSARLSKSRRLENLIAQLPGEKKNGLFGNLIALSLGLTPNFKSNFDLAEDAKLQLSKDTYDDDLDNLLAQIGDQYADLFLAAKNLSDAILLSDILRVNTEITKAPLSASMIKRYDEHHQDLTLLKALVRQQLPEKYKEIFFDQSKNGYAGYIDGGASQEEFYKFIKPILEKMDGTEELLVKLNREDLLRKQRTFDNGSIPHQIHLGELHAILRRQEDFYPFLKDNREKIEKILTFRIPYYVGPLARGNSRFAWMTRKSEETITPWNFEEVVDKGASAQSFIERMTNFDKNLPNEKVLPKHSLLYEYFTVYNELTKVKYVTEGMRKPAFLSGEQKKAIVDLLFKTNRKVTVKQLKEDYFKKIECFDSVEISGVEDRFNASLGTYHDLLKIIKDKDFLDNEENEDILEDIVLTLTLFEDREMIEERLKTYAHLFDDKVMKQLKRRRYTGWGRLSRKLINGIRDKQSGKTILDFLKSDGFANRNFMQLIHDDSLTFKEDIQKAQVSGQGDSLHEHIANLAGSPAIKKGILQTVKVVDELVKVMGRHKPENIVIEMARENQTTQKGQKNSRERMKRIEEGIKELGSQILKEHPVENTQLQNEKLYLYYLQNGRDMYVDQELDINRLSDYDVDHIVPQSFLKDDSIDNKVLTRSDKARGKSDNVPSEEVVKKMKNYWRQLLNAKLITQRKFDNLTKAERGGLSELDKAGFIKRQLVETRQITKHVAQILDSRMNTKYDENDKLIREVKVITLKSKLVSDFRKDFQFYKVREINNYHHAHDAYLNAVVGTALIKKYPKLESEFVYGDYKVYDVRKMIAKSEQEIGKATAKYFFYSNIMNFFKTEITLANGEIRKRPLIETNGETGEIVWDKGRDFATVRKVLSMPQVNIVKKTEVQTGGFSKESILPKRNSDKLIARKKDWDPKKYGGFDSPTVAYSVLVVAKVEKGKSKKLKSVKELLGITIMERSSFEKNPIDFLEAKGYKEVKKDLIIKLPKYSLFELENGRKRMLASAGELQKGNELALPSKYVNFLYLASHYEKLKGSPEDNEQKQLFVEQHKHYLDEIIEQISEFSKRVILADANLDKVLSAYNKHRDKPIREQAENIIHLFTLTNLGAPAAFKYFDTTIDRKRYTSTKEVLDATLIHQSITGLYETRIDLSQLGGDGGGGGGSEAAAKGGGGSGGMNPLQLLQPLPAEIKGTKLLAHWNSGATITCIPESFLEDEQPIKKTLIKTIHGEKQQNVYYVTFKVKGRKVEAEVIASPYEYILLSPTDVPWLTQQPLQLTILVPLQEYQEKILSKTALPEDQKQQLKTLFVKYDNLWQHWENQVGHRKIRPHNIATGDYPPRPQKQYPINPKAKPSIQIVIDDLLKQGVLTPQNSTMNTPVYPVPKPDGRWRMVLDYREVNKTIPLTAAQNQHSAGILATIVRQKYKTTLDLANGFWAHPITPESYWLTAFTWQGKQYCWTRLPQGFLNSPALFNADVVDLLKEIPNVQVYVDDIYLSHDDPKEHVQQLEKVFQILLQAGYVVSLKKSEIGQKTVEFLGFNITKEGRGLTDTFKTKLLNITPPKDLKQLQSILGKLNFARNFIPNFAELVQPLYNLIAPAKGKYIEWSEENTKQLNMVIEALNTASNLEERLPEQRLVIKVNTSPSAGYVRYYNETGKKPIMYLNYVFSKAELKFSMLEKLLTTMHKALIKAMDLAMGQEILVYSPIVSMTKIQKTPLPERKALPIRWITWMTYLEDPRIQFHYDKTLPELKHIPDVYTSSQSPVKHPSQYEGVFYTDGSAIKSPDPTKSNNAGMGIVHATYKPEYQVLNQWSIPLGNHTAQMAEIAAVEFACKKALKIPGPVLVITDSFYVAESANKELPYWKSNGFVNNKKKPLKHISKWKSIAECLSMKPDITIQHEKGISLQIPVFILKGNALADKLATQGSYVVNAGKRTADGSEFEKRTADGSEFESPKKKAKVE

SEQ ID NO: 7672 - protein, 2098 aa, synthetic construct
MPAAKRVKLDGGDKKYSIGLDIGTNSVGWAVITDEYKVPSKKFKVLGNTDRHSIKKNLIGALLFDSGETAEATRLKRTARRRYTRRKNRICYLQEIFSNEMAKVDDSFFHRLEESFLVEEDKKHERHPIFGNIVDEVAYHEKYPTIYHLRKKLVDSTDKADLRLIYLALAHMIKFRGHFLIEGDLNPDNSDVDKLFIQLVQTYNQLFEENPINASGVDAKAILSARLSKSRRLENLIAQLPGEKKNGLFGNLIALSLGLTPNFKSNFDLAEDAKLQLSKDTYDDDLDNLLAQIGDQYADLFLAAKNLSDAILLSDILRVNTEITKAPLSASMIKRYDEHHQDLTLLKALVRQQLPEKYKEIFFDQSKNGYAGYIDGGASQEEFYKFIKPILEKMDGTEELLVKLNREDLLRKQRTFDNGSIPHQIHLGELHAILRRQEDFYPFLKDNREKIEKILTFRIPYYVGPLARGNSRFAWMTRKSEETITPWNFEEVVDKGASAQSFIERMTNFDKNLPNEKVLPKHSLLYEYFTVYNELTKVKYVTEGMRKPAFLSGEQKKAIVDLLFKTNRKVTVKQLKEDYFKKIECFDSVEISGVEDRFNASLGTYHDLLKIIKDKDFLDNEENEDILEDIVLTLTLFEDREMIEERLKTYAHLFDDKVMKQLKRRRYTGWGRLSRKLINGIRDKQSGKTILDFLKSDGFANRNFMQLIHDDSLTFKEDIQKAQVSGQGDSLHEHIANLAGSPAIKKGILQTVKVVDELVKVMGRHKPENIVIEMARENQTTQKGQKNSRERMKRIEEGIKELGSQILKEHPVENTQLQNEKLYLYYLQNGRDMYVDQELDINRLSDYDVDHIVPQSFLKDDSIDNKVLTRSDKARGKSDNVPSEEVVKKMKNYWRQLLNAKLITQRKFDNLTKAERGGLSELDKAGFIKRQLVETRQITKHVAQILDSRMNTKYDENDKLIREVKVITLKSKLVSDFRKDFQFYKVREINNYHHAHDAYLNAVVGTALIKKYPKLESEFVYGDYKVYDVRKMIAKSEQEIGKATAKYFFYSNIMNFFKTEITLANGEIRKRPLIETNGETGEIVWDKGRDFATVRKVLSMPQVNIVKKTEVQTGGFSKESILPKRNSDKLIARKKDWDPKKYGGFDSPTVAYSVLVVAKVEKGKSKKLKSVKELLGITIMERSSFEKNPIDFLEAKGYKEVKKDLIIKLPKYSLFELENGRKRMLASAGELQKGNELALPSKYVNFLYLASHYEKLKGSPEDNEQKQLFVEQHKHYLDEIIEQISEFSKRVILADANLDKVLSAYNKHRDKPIREQAENIIHLFTLTNLGAPAAFKYFDTTIDRKRYTSTKEVLDATLIHQSITGLYETRIDLSQLGGDGGGGGGSEAAAKGGGGSGGVLNLEEEYRLHEKPVPSSIDPSWLQLFPTVWAERAGMGLANQVPPVVVELRSGASPVAVRQYPMSKEAREGIRPHIQKFLDLGVLVPCRSPWNTPLLPVKKPGTNDYRPVQDLREINKRVQDIHPTVPNPYNLLSSLPPSYTWYSVLDLKDAFFCLRLHPNSQPLFAFEWKDPEKGNTGQLTWTRLPQGFKNSPTLFNEALHRDLAPFRALNPQVVLLQYVDDLLVAAPTYEDCKKGTQKLLQELSKLGYRVSAKKAQLCQREVTYLGYLLKEGKRWLTPARKATVMKIPVPTTPRQVREFLGKAGFCRLFIPGFASLAAPLYPLTKPSIPFIWTEEHQQAFDHIKKALLSAPALALPDLTKPFTLYIDERAGVARGVLTQTLGPWRRPVAYLSKKLDPVASGWPTCLKAVAAVALLLKDADKLTLGQNVTVIASHSLESIVRQPPDRWMTNARMTHYQSLLLNERVSFAPPAVLNPATLLPVESEATPVHRCSEILAEETGTRRDLEDQPLPGVPTWYTDGSSFITEGKRRAGAPIVDGKRTVWASSLPEGTSAQKAELVALTQALRLAEGKNINIYTDSRYAFATAHIHGAIYKQRGWLTSAGKDIKNKEEILALLEAIHLPRRVAIIHCPGHQRGSNPVATGNRRADEAAKQAALSTRVLAGTTKPAGKRTADGSEFEKRTADGSEFESPKKKAKVE

SEQ ID NO: 7673 - protein, 2017 aa, synthetic construct
MPAAKRVKLDGGDKKYSIGLDIGTNSVGWAVITDEYKVPSKKFKVLGNTDRHSIKKNLIGALLFDSGETAEATRLKRTARRRYTRRKNRICYLQEIFSNEMAKVDDSFFHRLEESFLVEEDKKHERHPIFGNIVDEVAYHEKYPTIYHLRKKLVDSTDKADLRLIYLALAHMIKFRGHFLIEGDLNPDNSDVDKLFIQLVQTYNQLFEENPINASGVDAKAILSARLSKSRRLENLIAQLPGEKKNGLFGNLIALSLGLTPNFKSNFDLAEDAKLQLSKDTYDDDLDNLLAQIGDQYADLFLAAKNLSDAILLSDILRVNTEITKAPLSASMIKRYDEHHQDLTLLKALVRQQLPEKYKEIFFDQSKNGYAGYIDGGASQEEFYKFIKPILEKMDGTEELLVKLNREDLLRKQRTFDNGSIPHQIHLGELHAILRRQEDFYPFLKDNREKIEKILTFRIPYYVGPLARGNSRFAWMTRKSEETITPWNFEEVVDKGASAQSFIERMTNFDKNLPNEKVLPKHSLLYEYFTVYNELTKVKYVTEGMRKPAFLSGEQKKAIVDLLFKTNRKVTVKQLKEDYFKKIECFDSVEISGVEDRFNASLGTYHDLLKIIKDKDFLDNEENEDILEDIVLTLTLFEDREMIEERLKTYAHLFDDKVMKQLKRRRYTGWGRLSRKLINGIRDKQSGKTILDFLKSDGFANRNFMQLIHDDSLTFKEDIQKAQVSGQGDSLHEHIANLAGSPAIKKGILQTVKVVDELVKVMGRHKPENIVIEMARENQTTQKGQKNSRERMKRIEEGIKELGSQILKEHPVENTQLQNEKLYLYYLQNGRDMYVDQELDINRLSDYDVDHIVPQSFLKDDSIDNKVLTRSDKARGKSDNVPSEEVVKKMKNYWRQLLNAKLITQRKFDNLTKAERGGLSELDKAGFIKRQLVETRQITKHVAQILDSRMNTKYDENDKLIREVKVITLKSKLVSDFRKDFQFYKVREINNYHHAHDAYLNAVVGTALIKKYPKLESEFVYGDYKVYDVRKMIAKSEQEIGKATAKYFFYSNIMNFFKTEITLANGEIRKRPLIETNGETGEIVWDKGRDFATVRKVLSMPQVNIVKKTEVQTGGFSKESILPKRNSDKLIARKKDWDPKKYGGFDSPTVAYSVLVVAKVEKGKSKKLKSVKELLGITIMERSSFEKNPIDFLEAKGYKEVKKDLIIKLPKYSLFELENGRKRMLASAGELQKGNELALPSKYVNFLYLASHYEKLKGSPEDNEQKQLFVEQHKHYLDEIIEQISEFSKRVILADANLDKVLSAYNKHRDKPIREQAENIIHLFTLTNLGAPAAFKYFDTTIDRKRYTSTKEVLDATLIHQSITGLYETRIDLSQLGGDGGGGGGSEAAAKGGGGSGGAVLGLEHLPRPPEISQFPLNPERLQALQHLVRKALEAGHIEPYTGPGNNPVFPVKKANGTWRFIHDLRATNSLTIDLSSSSPGPPDLSSLPTTLAHLQTIDLKDAFFQIPLPKQFQPYFAFTVPQQCNYGPGTRYAWRVLPQGFKNSPTLFQMQLAHILQPIRQAFPQCTILQYMDDILLASPSHADLQLLSEATMASLISHGLPVSENKTQQTPGTIKFLGQIISPNHLTYDAVPKVPIRSRWALPELQALLGEIQWVSKGTPTLRQPLHSLYCALQPHTDPRDQIYLNPSQVQSLVQLRQALSQNCRSRLVQTLPLLGAIMLTLTGTTTVVFQSKQQWPLVWLHAPLPHTSQCPWGQLLASAVLLLDKYTLQSYGLLCQTIHHNISTQTFNQFIQTSDHPSVPILLHHSHRFKNLGAQTGELWNTFLKTTAPLAPVKALMPVFTLSPVIINTAPCLFSDGSTSQAAYILWDKHILSQRSFPLPPPHKSAQRAELLGLLHGLSSARSWRCLNIFLDSKYLYHYLRTLALGTFQGRSSQAPFQALLPRLLSRKVVYLHHVRSHTNLPDPISRLNALTDALLITPVLQLAGKRTADGSEFEKRTADGSEFESPKKKAKVE

SEQ ID NO: 7674 - protein, 2100 aa, synthetic construct
MPAAKRVKLDGGDKKYSIGLDIGTNSVGWAVITDEYKVPSKKFKVLGNTDRHSIKKNLIGALLFDSGETAEATRLKRTARRRYTRRKNRICYLQEIFSNEMAKVDDSFFHRLEESFLVEEDKKHERHPIFGNIVDEVAYHEKYPTIYHLRKKLVDSTDKADLRLIYLALAHMIKFRGHFLIEGDLNPDNSDVDKLFIQLVQTYNQLFEENPINASGVDAKAILSARLSKSRRLENLIAQLPGEKKNGLFGNLIALSLGLTPNFKSNFDLAEDAKLQLSKDTYDDDLDNLLAQIGDQYADLFLAAKNLSDAILLSDILRVNTEITKAPLSASMIKRYDEHHQDLTLLKALVRQQLPEKYKEIFFDQSKNGYAGYIDGGASQEEFYKFIKPILEKMDGTEELLVKLNREDLLRKQRTFDNGSIPHQIHLGELHAILRRQEDFYPFLKDNREKIEKILTFRIPYYVGPLARGNSRFAWMTRKSEETITPWNFEEVVDKGASAQSFIERMTNFDKNLPNEKVLPKHSLLYEYFTVYNELTKVKYVTEGMRKPAFLSGEQKKAIVDLLFKTNRKVTVKQLKEDYFKKIECFDSVEISGVEDRFNASLGTYHDLLKIIKDKDFLDNEENEDILEDIVLTLTLFEDREMIEERLKTYAHLFDDKVMKQLKRRRYTGWGRLSRKLINGIRDKQSGKTILDFLKSDGFANRNFMQLIHDDSLTFKEDIQKAQVSGQGDSLHEHIANLAGSPAIKKGILQTVKVVDELVKVMGRHKPENIVIEMARENQTTQKGQKNSRERMKRIEEGIKELGSQILKEHPVENTQLQNEKLYLYYLQNGRDMYVDQELDINRLSDYDVDHIVPQSFLKDDSIDNKVLTRSDKARGKSDNVPSEEVVKKMKNYWRQLLNAKLITQRKFDNLTKAERGGLSELDKAGFIKRQLVETRQITKHVAQILDSRMNTKYDENDKLIREVKVITLKSKLVSDFRKDFQFYKVREINNYHHAHDAYLNAVVGTALIKKYPKLESEFVYGDYKVYDVRKMIAKSEQEIGKATAKYFFYSNIMNFFKTEITLANGEIRKRPLIETNGETGEIVWDKGRDFATVRKVLSMPQVNIVKKTEVQTGGFSKESILPKRNSDKLIARKKDWDPKKYGGFDSPTVAYSVLVVAKVEKGKSKKLKSVKELLGITIMERSSFEKNPIDFLEAKGYKEVKKDLIIKLPKYSLFELENGRKRMLASAGELQKGNELALPSKYVNFLYLASHYEKLKGSPEDNEQKQLFVEQHKHYLDEIIEQISEFSKRVILADANLDKVLSAYNKHRDKPIREQAENIIHLFTLTNLGAPAAFKYFDTTIDRKRYTSTKEVLDATLIHQSITGLYETRIDLSQLGGDGGGGGGSEAAAKGGGGSGGTLNLEDEYRLYETSAEPEVSPGSTWLSDFPQAWAETGGMGLAVRQAPLIIPLKATSTPVSIKQYPMSQEAKLGIKPHIQRLLDQGILVPCQSPWNTPLLPVKKPGTNDYRPVQDLREVNKRVEDIHPTVPNPYNLLSGLPPSHRWYTVLDLKDAFFCLRLHPTSQPLFAFEWRDPGMGISGQLTWTRLPQGFKNSPTLFNEALHRDLADFRIQHPDLILLQYVDDILLAATSELDCQQGTRALLLTLGNLGYRASAKKAQLCQKQVKYLGYLLKEGQRWLTEARKETVMGQPTPKTPRQLREFLGKAGFCRLFIPGFAEMAAPLYPLTKPGTLFNWGPDQQKAYQEIKQALLTAPALGLPDLTKPFELFVDEKQGYAKGVLTQKLGPWRRPVAYLSKKLDPVAAGWPPCLRMVAAIAVLRKDAGKLTMGQPLVILAPHAVEALVKQPPDRWLSNARMTHYQAMLLDTDRVQFGPVVALNPATLLPLPEEGAPHDCLEILAETHGTRPDLTDQPIPDADHTWYTDGSSFLQEGQRKAGAAVTTETEVIWARALPAGTSAQRAELIALTQALKMAEGKRLNVYTDSRYAFATAHIHGEIYRRRGWLTSEGREIKNKSEILALLKALFLPKRLSIIHCLGHQKGDSAEARGNRLADQAAREAAIKTPPDTSTLLAGKRTADGSEFEKRTADGSEFESPKKKAKVE

SEQ ID NO: 7675 - protein, 2100 aa, synthetic construct
MPAAKRVKLDGGDKKYSIGLDIGTNSVGWAVITDEYKVPSKKFKVLGNTDRHSIKKNLIGALLFDSGETAEATRLKRTARRRYTRRKNRICYLQEIFSNEMAKVDDSFFHRLEESFLVEEDKKHERHPIFGNIVDEVAYHEKYPTIYHLRKKLVDSTDKADLRLIYLALAHMIKFRGHFLIEGDLNPDNSDVDKLFIQLVQTYNQLFEENPINASGVDAKAILSARLSKSRRLENLIAQLPGEKKNGLFGNLIALSLGLTPNFKSNFDLAEDAKLQLSKDTYDDDLDNLLAQIGDQYADLFLAAKNLSDAILLSDILRVNTEITKAPLSASMIKRYDEHHQDLTLLKALVRQQLPEKYKEIFFDQSKNGYAGYIDGGASQEEFYKFIKPILEKMDGTEELLVKLNREDLLRKQRTFDNGSIPHQIHLGELHAILRRQEDFYPFLKDNREKIEKILTFRIPYYVGPLARGNSRFAWMTRKSEETITPWNFEEVVDKGASAQSFIERMTNFDKNLPNEKVLPKHSLLYEYFTVYNELTKVKYVTEGMRKPAFLSGEQKKAIVDLLFKTNRKVTVKQLKEDYFKKIECFDSVEISGVEDRFNASLGTYHDLLKIIKDKDFLDNEENEDILEDIVLTLTLFEDREMIEERLKTYAHLFDDKVMKQLKRRRYTGWGRLSRKLINGIRDKQSGKTILDFLKSDGFANRNFMQLIHDDSLTFKEDIQKAQVSGQGDSLHEHIANLAGSPAIKKGILQTVKVVDELVKVMGRHKPENIVIEMARENQTTQKGQKNSRERMKRIEEGIKELGSQILKEHPVENTQLQNEKLYLYYLQNGRDMYVDQELDINRLSDYDVDHIVPQSFLKDDSIDNKVLTRSDKARGKSDNVPSEEVVKKMKNYWRQLLNAKLITQRKFDNLTKAERGGLSELDKAGFIKRQLVETRQITKHVAQILDSRMNTKYDENDKLIREVKVITLKSKLVSDFRKDFQFYKVREINNYHHAHDAYLNAVVGTALIKKYPKLESEFVYGDYKVYDVRKMIAKSEQEIGKATAKYFFYSNIMNFFKTEITLANGEIRKRPLIETNGETGEIVWDKGRDFATVRKVLSMPQVNIVKKTEVQTGGFSKESILPKRNSDKLIARKKDWDPKKYGGFDSPTVAYSVLVVAKVEKGKSKKLKSVKELLGITIMERSSFEKNPIDFLEAKGYKEVKKDLIIKLPKYSLFELENGRKRMLASAGELQKGNELALPSKYVNFLYLASHYEKLKGSPEDNEQKQLFVEQHKHYLDEIIEQISEFSKRVILADANLDKVLSAYNKHRDKPIREQAENIIHLFTLTNLGAPAAFKYFDTTIDRKRYTSTKEVLDATLIHQSITGLYETRIDLSQLGGDGGGGGGSEAAAKGGGGSGGTLGIEDEYRLHETSTEPDVSLGSTWLSDFPQAWAETGGMGLAVRQAPLIIPLKATSTPVSIQQYPMSHEARLGIKPHIQRLLDQGILVPCQSPWNTPLLPVKKPGTNDYRPVQDLREVNKRVEDIHPTVPNPYNLLSGLPPSHQWYTVLDLKDAFFCLRLHPTSQPLFAFEWRDPGMGISGQLTWTRLPQGFKNSPTLFNEALHRDLADFRIQHPDLILLQYVDDILLAATSELDCQQGTRALLQTLGDLGYRASAKKAQICQKQVKYLGYLLREGQRWLTEARKETVMGQPVPKTPRQLREFLGTAGFCRLWIPGFAEMAAPLYPLTKPGTLFSWGPDQQKAYQEIKQALLTAPALGLPDLTKPFELFVDEKQGYAKGVLTQKLGPWRRPVAYLSKKLDPVAAGWPPCLRMVAAIAVLTKDAGKLTMGQPLVILAPHAVEALVKQPPDRWLSNARMTHYQAMLLDTDRVQFGPVVALNPATLLPLPEEGAPHDCLEILAETHGTRPDLTDQPIPDADHTWYTDGSSFLQEGQRKAGAAVTTETEVIWAGALPAGTSAQRAELIALTQALKMAEGKRLNVYTDSRYAFATAHIHGEIYRRRGWLTSEGREIKNKSEILALLKALFLPKRLSIIHCLGHQKGDSAEARGNRLADQAAREAAIKTPPDTSTLLAGKRTADGSEFEKRTADGSEFESPKKKAKVE

SEQ ID NO: 7676 - protein, 2100 aa, synthetic construct
MPAAKRVKLDGGDKKYSIGLDIGTNSVGWAVITDEYKVPSKKFKVLGNTDRHSIKKNLIGALLFDSGETAEATRLKRTARRRYTRRKNRICYLQEIFSNEMAKVDDSFFHRLEESFLVEEDKKHERHPIFGNIVDEVAYHEKYPTIYHLRKKLVDSTDKADLRLIYLALAHMIKFRGHFLIEGDLNPDNSDVDKLFIQLVQTYNQLFEENPINASGVDAKAILSARLSKSRRLENLIAQLPGEKKNGLFGNLIALSLGLTPNFKSNFDLAEDAKLQLSKDTYDDDLDNLLAQIGDQYADLFLAAKNLSDAILLSDILRVNTEITKAPLSASMIKRYDEHHQDLTLLKALVRQQLPEKYKEIFFDQSKNGYAGYIDGGASQEEFYKFIKPILEKMDGTEELLVKLNREDLLRKQRTFDNGSIPHQIHLGELHAILRRQEDFYPFLKDNREKIEKILTFRIPYYVGPLARGNSRFAWMTRKSEETITPWNFEEVVDKGASAQSFIERMTNFDKNLPNEKVLPKHSLLYEYFTVYNELTKVKYVTEGMRKPAFLSGEQKKAIVDLLFKTNRKVTVKQLKEDYFKKIECFDSVEISGVEDRFNASLGTYHDLLKIIKDKDFLDNEENEDILEDIVLTLTLFEDREMIEERLKTYAHLFDDKVMKQLKRRRYTGWGRLSRKLINGIRDKQSGKTILDFLKSDGFANRNFMQLIHDDSLTFKEDIQKAQVSGQGDSLHEHIANLAGSPAIKKGILQTVKVVDELVKVMGRHKPENIVIEMARENQTTQKGQKNSRERMKRIEEGIKELGSQILKEHPVENTQLQNEKLYLYYLQNGRDMYVDQELDINRLSDYDVDHIVPQSFLKDDSIDNKVLTRSDKARGKSDNVPSEEVVKKMKNYWRQLLNAKLITQRKFDNLTKAERGGLSELDKAGFIKRQLVETRQITKHVAQILDSRMNTKYDENDKLIREVKVITLKSKLVSDFRKDFQFYKVREINNYHHAHDAYLNAVVGTALIKKYPKLESEFVYGDYKVYDVRKMIAKSEQEIGKATAKYFFYSNIMNFFKTEITLANGEIRKRPLIETNGETGEIVWDKGRDFATVRKVLSMPQVNIVKKTEVQTGGFSKESILPKRNSDKLIARKKDWDPKKYGGFDSPTVAYSVLVVAKVEKGKSKKLKSVKELLGITIMERSSFEKNPIDFLEAKGYKEVKKDLIIKLPKYSLFELENGRKRMLASAGELQKGNELALPSKYVNFLYLASHYEKLKGSPEDNEQKQLFVEQHKHYLDEIIEQISEFSKRVILADANLDKVLSAYNKHRDKPIREQAENIIHLFTLTNLGAPAAFKYFDTTIDRKRYTSTKEVLDATLIHQSITGLYETRIDLSQLGGDGGGGGGSEAAAKGGGGSGGTLNIEDEYRLHETSKEPDVSLGSTWLSDFPQAWAETGGMGLAVRQAPLIIPLKATSTPVSIKQYPMSQEARLGIKPHIQRLLDQGILVPCQSPWNTPLLPVKKPGTNDYRPVQDLREVNKRVEDIHPTVPNPYNLLSGLPPSHQWYTVLDLKDAFFCLRLHPTSQPLFAFEWRDPEMGISGQLTWTRLPQGFKNSPTLFNEALHRDLAGFRIQHPDLILLQYVDDLLLAATSELDCQQGTRALLQTLGDLGYRASAKKAQICQKQVKYLGYLLKEGQRWLTEARKETVMGQPIPKTPRQLREFLGTAGFCRLWIPGFAEMAAPLYPLTKPGTLFNWGPDQQKAFQEIKQALLTAPALGLPDLTKPFELFVDEKQGYAKGVLTQKLGPWRRPVAYLSKKLDPVAAGWPPCLRMVAAIAVLTKDAGKLTMGQPLVILAPHAVEALVKQPPDRWLSNARMTHYQALLLDTDRVQFGPVVALNPATLLPLPEEGLQHDCLDILAEAHGTRSDLMDQPLPDADHTWYTDGSSFLQEGQRKAGAAVTTETEVIWARALPAGTSAQRAELIALTQALKMAEGKKLNVYTDSRYAFATAHIHGEIYRRRGWLTSEGKEIKNKDEILALLKALFLPKRLSIIHCPGHQKGNSAEARGNRMADQAAREVATRETPETSTLLAGKRTADGSEFEKRTADGSEFESPKKKAKVE

SEQ ID NO: 7677 - protein, 2100 aa, synthetic construct
MPAAKRVKLDGGDKKYSIGLDIGTNSVGWAVITDEYKVPSKKFKVLGNTDRHSIKKNLIGALLFDSGETAEATRLKRTARRRYTRRKNRICYLQEIFSNEMAKVDDSFFHRLEESFLVEEDKKHERHPIFGNIVDEVAYHEKYPTIYHLRKKLVDSTDKADLRLIYLALAHMIKFRGHFLIEGDLNPDNSDVDKLFIQLVQTYNQLFEENPINASGVDAKAILSARLSKSRRLENLIAQLPGEKKNGLFGNLIALSLGLTPNFKSNFDLAEDAKLQLSKDTYDDDLDNLLAQIGDQYADLFLAAKNLSDAILLSDILRVNTEITKAPLSASMIKRYDEHHQDLTLLKALVRQQLPEKYKEIFFDQSKNGYAGYIDGGASQEEFYKFIKPILEKMDGTEELLVKLNREDLLRKQRTFDNGSIPHQIHLGELHAILRRQEDFYPFLKDNREKIEKILTFRIPYYVGPLARGNSRFAWMTRKSEETITPWNFEEVVDKGASAQSFIERMTNFDKNLPNEKVLPKHSLLYEYFTVYNELTKVKYVTEGMRKPAFLSGEQKKAIVDLLFKTNRKVTVKQLKEDYFKKIECFDSVEISGVEDRFNASLGTYHDLLKIIKDKDFLDNEENEDILEDIVLTLTLFEDREMIEERLKTYAHLFDDKVMKQLKRRRYTGWGRLSRKLINGIRDKQSGKTILDFLKSDGFANRNFMQLIHDDSLTFKEDIQKAQVSGQGDSLHEHIANLAGSPAIKKGILQTVKVVDELVKVMGRHKPENIVIEMARENQTTQKGQKNSRERMKRIEEGIKELGSQILKEHPVENTQLQNEKLYLYYLQNGRDMYVDQELDINRLSDYDVDHIVPQSFLKDDSIDNKVLTRSDKARGKSDNVPSEEVVKKMKNYWRQLLNAKLITQRKFDNLTKAERGGLSELDKAGFIKRQLVETRQITKHVAQILDSRMNTKYDENDKLIREVKVITLKSKLVSDFRKDFQFYKVREINNYHHAHDAYLNAVVGTALIKKYPKLESEFVYGDYKVYDVRKMIAKSEQEIGKATAKYFFYSNIMNFFKTEITLANGEIRKRPLIETNGETGEIVWDKGRDFATVRKVLSMPQVNIVKKTEVQTGGFSKESILPKRNSDKLIARKKDWDPKKYGGFDSPTVAYSVLVVAKVEKGKSKKLKSVKELLGITIMERSSFEKNPIDFLEAKGYKEVKKDLIIKLPKYSLFELENGRKRMLASAGELQKGNELALPSKYVNFLYLASHYEKLKGSPEDNEQKQLFVEQHKHYLDEIIEQISEFSKRVILADANLDKVLSAYNKHRDKPIREQAENIIHLFTLTNLGAPAAFKYFDTTIDRKRYTSTKEVLDATLIHQSITGLYETRIDLSQLGGDGGGGGGSEAAAKGGGGSGGTLNIEDEYRLHETSKGPDVPLGSTWLSDFPQAWAETGGMGLAVRQAPLIIPLKATSTPVSIKQYPMSQEARLGIKPHIQRLLDQGILVPCQSPWNTPLLPVKKPGTNDYRPVQDLREVNKRVEDIHPTVPNPYNLLSGLPPSHQWYTVLDLKDAFFCLRLHPTSQSLFAFEWRDPEMGISGQLTWTRLPQGFKNSPTLFNEALHRDLADFRIQHPDLILLQYVDDLLLAATSELDCQQGTRALLQTLGDLGYRASAKKAQICQKQVKYLGYLLKEGQRWLTEARKETVMGQPTPKTPRQLREFLGTAGFCRLWIPGFAEMAAPLYPLTKPGTLFEWGPDQQKAYQEIKQALLTAPALGLPDLTKPFELFVDEKQGYAKGVLTQKLGPWRRPVAYLSKKLDPVAAGWPPCLRMVAAIAVLTKDAGKLTMGQPLVILAPHAVEALVKQPPDRWLSNARMTHYQALLLDTDRVQFGPIVALNPATLLPLPEEGLQHDCLDILAEAHGTRPDLTDQPLPDADHTWYTDGSSFLQEGQRKAGAAVTTETEVVWAKALPAGTSAQRAELIALTQALKMAEGKKLNVYTDSRYAFATAHIHGEIYRRRGWLTSEGKEIKNKDEILALLKALFLPKRLSIIHCPGHQKGNRAEARGNRMADQAAREVATRETPETSTLLAGKRTADGSEFEKRTADGSEFESPKKKAKVE

SEQ ID NO: 7678 - protein, 2120 aa, synthetic construct
MPAAKRVKLDGGDKKYSIGLDIGTNSVGWAVITDEYKVPSKKFKVLGNTDRHSIKKNLIGALLFDSGETAEATRLKRTARRRYTRRKNRICYLQEIFSNEMAKVDDSFFHRLEESFLVEEDKKHERHPIFGNIVDEVAYHEKYPTIYHLRKKLVDSTDKADLRLIYLALAHMIKFRGHFLIEGDLNPDNSDVDKLFIQLVQTYNQLFEENPINASGVDAKAILSARLSKSRRLENLIAQLPGEKKNGLFGNLIALSLGLTPNFKSNFDLAEDAKLQLSKDTYDDDLDNLLAQIGDQYADLFLAAKNLSDAILLSDILRVNTEITKAPLSASMIKRYDEHHQDLTLLKALVRQQLPEKYKEIFFDQSKNGYAGYIDGGASQEEFYKFIKPILEKMDGTEELLVKLNREDLLRKQRTFDNGSIPHQIHLGELHAILRRQEDFYPFLKDNREKIEKILTFRIPYYVGPLARGNSRFAWMTRKSEETITPWNFEEVVDKGASAQSFIERMTNFDKNLPNEKVLPKHSLLYEYFTVYNELTKVKYVTEGMRKPAFLSGEQKKAIVDLLFKTNRKVTVKQLKEDYFKKIECFDSVEISGVEDRFNASLGTYHDLLKIIKDKDFLDNEENEDILEDIVLTLTLFEDREMIEERLKTYAHLFDDKVMKQLKRRRYTGWGRLSRKLINGIRDKQSGKTILDFLKSDGFANRNFMQLIHDDSLTFKEDIQKAQVSGQGDSLHEHIANLAGSPAIKKGILQTVKVVDELVKVMGRHKPENIVIEMARENQTTQKGQKNSRERMKRIEEGIKELGSQILKEHPVENTQLQNEKLYLYYLQNGRDMYVDQELDINRLSDYDVDHIVPQSFLKDDSIDNKVLTRSDKARGKSDNVPSEEVVKKMKNYWRQLLNAKLITQRKFDNLTKAERGGLSELDKAGFIKRQLVETRQITKHVAQILDSRMNTKYDENDKLIREVKVITLKSKLVSDFRKDFQFYKVREINNYHHAHDAYLNAVVGTALIKKYPKLESEFVYGDYKVYDVRKMIAKSEQEIGKATAKYFFYSNIMNFFKTEITLANGEIRKRPLIETNGETGEIVWDKGRDFATVRKVLSMPQVNIVKKTEVQTGGFSKESILPKRNSDKLIARKKDWDPKKYGGFDSPTVAYSVLVVAKVEKGKSKKLKSVKELLGITIMERSSFEKNPIDFLEAKGYKEVKKDLIIKLPKYSLFELENGRKRMLASAGELQKGNELALPSKYVNFLYLASHYEKLKGSPEDNEQKQLFVEQHKHYLDEIIEQISEFSKRVILADANLDKVLSAYNKHRDKPIREQAENIIHLFTLTNLGAPAAFKYFDTTIDRKRYTSTKEVLDATLIHQSITGLYETRIDLSQLGGDGGGGGGSEAAAKGGGGSGGVQEISDSRPMLHIYLNGRRFLGLLDTGADKTCIAGRDWPANWPIHQTESSLQGLGMACGVARSSQPLRWQHEDKSGIIHPFVIPTLPFTLWGRDIMKDIKVRLMTDSPDDSQDLMIGAIESNLFADQISWKSDQPVWLNQWPLKQEKLQALQQLVTEQLQLGHLEESNSPWNTPVFVIKKKSGKWRLLQDLRAVNATMHDMGALQPGLPSPPAVPKGWEIIIIDLQDCFFNIKLHPEDCKRFAFSVPSPNFKRPYQRFQWKVLPQGMKNSPTLCQKFVDKAILTVRDKYQDSYIVHYMDDILLAHPSRSIVDEILTSMIQALNKHGLVVSTEKIQKYDNLKYLGTHIQGDSVSYQKLQIRTDKLRTLNDFQKLLGNINWIRPFLKLTTGELKPLFEILNPDSNPISTRKLTPEACKALQLMNERLSTARVKRLDLSQPWSLCILKTEYTPTACLWQDGVVEWIHLPHISPKVITPYDIFCTQLIIKGRHRSKELFSKDPDYIVVPYTKVQFDLLLQEKEDWPISLLGFLGEVHFHLPKDPLLTFTLQTAIIFPHMTSTTPLEKGIVIFTDGSANGRSVTYIQGREPIIKENTQNTAQQAEIVAVITAFEEVSQPFNLYTDSKYVTGLFPEIETATLSPRTKIYTELKHLQRLIHKRQEKFYIGHIRGHTGLPGPLAQGNAYADSLTRILTAAGKRTADGSEFEKRTADGSEFESPKKKAKVE

SEQ ID NO: 7679 - protein, 2098 aa, synthetic construct
MPAAKRVKLDGGDKKYSIGLDIGTNSVGWAVITDEYKVPSKKFKVLGNTDRHSIKKNLIGALLFDSGETAEATRLKRTARRRYTRRKNRICYLQEIFSNEMAKVDDSFFHRLEESFLVEEDKKHERHPIFGNIVDEVAYHEKYPTIYHLRKKLVDSTDKADLRLIYLALAHMIKFRGHFLIEGDLNPDNSDVDKLFIQLVQTYNQLFEENPINASGVDAKAILSARLSKSRRLENLIAQLPGEKKNGLFGNLIALSLGLTPNFKSNFDLAEDAKLQLSKDTYDDDLDNLLAQIGDQYADLFLAAKNLSDAILLSDILRVNTEITKAPLSASMIKRYDEHHQDLTLLKALVRQQLPEKYKEIFFDQSKNGYAGYIDGGASQEEFYKFIKPILEKMDGTEELLVKLNREDLLRKQRTFDNGSIPHQIHLGELHAILRRQEDFYPFLKDNREKIEKILTFRIPYYVGPLARGNSRFAWMTRKSEETITPWNFEEVVDKGASAQSFIERMTNFDKNLPNEKVLPKHSLLYEYFTVYNELTKVKYVTEGMRKPAFLSGEQKKAIVDLLFKTNRKVTVKQLKEDYFKKIECFDSVEISGVEDRFNASLGTYHDLLKIIKDKDFLDNEENEDILEDIVLTLTLFEDREMIEERLKTYAHLFDDKVMKQLKRRRYTGWGRLSRKLINGIRDKQSGKTILDFLKSDGFANRNFMQLIHDDSLTFKEDIQKAQVSGQGDSLHEHIANLAGSPAIKKGILQTVKVVDELVKVMGRHKPENIVIEMARENQTTQKGQKNSRERMKRIEEGIKELGSQILKEHPVENTQLQNEKLYLYYLQNGRDMYVDQELDINRLSDYDVDHIVPQSFLKDDSIDNKVLTRSDKARGKSDNVPSEEVVKKMKNYWRQLLNAKLITQRKFDNLTKAERGGLSELDKAGFIKRQLVETRQITKHVAQILDSRMNTKYDENDKLIREVKVITLKSKLVSDFRKDFQFYKVREINNYHHAHDAYLNAVVGTALIKKYPKLESEFVYGDYKVYDVRKMIAKSEQEIGKATAKYFFYSNIMNFFKTEITLANGEIRKRPLIETNGETGEIVWDKGRDFATVRKVLSMPQVNIVKKTEVQTGGFSKESILPKRNSDKLIARKKDWDPKKYGGFDSPTVAYSVLVVAKVEKGKSKKLKSVKELLGITIMERSSFEKNPIDFLEAKGYKEVKKDLIIKLPKYSLFELENGRKRMLASAGELQKGNELALPSKYVNFLYLASHYEKLKGSPEDNEQKQLFVEQHKHYLDEIIEQISEFSKRVILADANLDKVLSAYNKHRDKPIREQAENIIHLFTLTNLGAPAAFKYFDTTIDRKRYTSTKEVLDATLIHQSITGLYETRIDLSQLGGDGGGGGGSEAAAKGGGGSGGVLNLEEEYRLHEKPVPSSIDPSWLQLFPTVWAERAGMGLANQVPPVVVELRSGASPVAVRQYPMSKEAREGIRPHIQRFLDLGVLVPCQSPWNTPLLPVKKPGTNDYRPVQDLREINKRVQDIHPTVPNPYNLLSSLPPSHTWYSVLDLKDAFFCLKLHPNSQPLFAFEWRDPEKGNTGQLTWTRLPQGFKNSPTLFNEALHRDLAPFRALNPQVVLLQYVDDLLVAAPTYRDCKEGTQKLLQELSKLGYRVSAKKAQLCQKEVTYLGYLLKEGKRWLTPARKATVMKIPPPTTPRQVREFLGTAGFCRLWIPGFASLAAPLYPLTKPSIPFIWTEEHQKAFDRIKEALLSAPALALPDLTKPFTLYVDERAGVARGVLTQTLGPWRRPVAYLSKKLDPVASGWPTCLKAVAAVALLLKDADKLTLGQNVTVIASHSLESIVRQPPDRWMTNARMTHYQSLLLNERVSFAPPAVLNPATLLPVESEATPVHRCSEILAEETGTRRDLKDQPLPGVPAWYTDGSSFIAEGKRRAGAAIVDGKRTVWASSLPEGTSAQKAELVALTQALRLAEGKDINIYTDSRYAFATAHIHGAIYKQRGWLTSAGKDIKNKEEILALLEAIHLPKRVAIIHCPGHQKGNDPVATGNRRADEAAKQAALSTRVLAETTKPAGKRTADGSEFEKRTADGSEFESPKKKAKVE

SEQ ID NO: 7680 - protein, 2102 aa, synthetic construct
MPAAKRVKLDGGDKKYSIGLDIGTNSVGWAVITDEYKVPSKKFKVLGNTDRHSIKKNLIGALLFDSGETAEATRLKRTARRRYTRRKNRICYLQEIFSNEMAKVDDSFFHRLEESFLVEEDKKHERHPIFGNIVDEVAYHEKYPTIYHLRKKLVDSTDKADLRLIYLALAHMIKFRGHFLIEGDLNPDNSDVDKLFIQLVQTYNQLFEENPINASGVDAKAILSARLSKSRRLENLIAQLPGEKKNGLFGNLIALSLGLTPNFKSNFDLAEDAKLQLSKDTYDDDLDNLLAQIGDQYADLFLAAKNLSDAILLSDILRVNTEITKAPLSASMIKRYDEHHQDLTLLKALVRQQLPEKYKEIFFDQSKNGYAGYIDGGASQEEFYKFIKPILEKMDGTEELLVKLNREDLLRKQRTFDNGSIPHQIHLGELHAILRRQEDFYPFLKDNREKIEKILTFRIPYYVGPLARGNSRFAWMTRKSEETITPWNFEEVVDKGASAQSFIERMTNFDKNLPNEKVLPKHSLLYEYFTVYNELTKVKYVTEGMRKPAFLSGEQKKAIVDLLFKTNRKVTVKQLKEDYFKKIECFDSVEISGVEDRFNASLGTYHDLLKIIKDKDFLDNEENEDILEDIVLTLTLFEDREMIEERLKTYAHLFDDKVMKQLKRRRYTGWGRLSRKLINGIRDKQSGKTILDFLKSDGFANRNFMQLIHDDSLTFKEDIQKAQVSGQGDSLHEHIANLAGSPAIKKGILQTVKVVDELVKVMGRHKPENIVIEMARENQTTQKGQKNSRERMKRIEEGIKELGSQILKEHPVENTQLQNEKLYLYYLQNGRDMYVDQELDINRLSDYDVDHIVPQSFLKDDSIDNKVLTRSDKARGKSDNVPSEEVVKKMKNYWRQLLNAKLITQRKFDNLTKAERGGLSELDKAGFIKRQLVETRQITKHVAQILDSRMNTKYDENDKLIREVKVITLKSKLVSDFRKDFQFYKVREINNYHHAHDAYLNAVVGTALIKKYPKLESEFVYGDYKVYDVRKMIAKSEQEIGKATAKYFFYSNIMNFFKTEITLANGEIRKRPLIETNGETGEIVWDKGRDFATVRKVLSMPQVNIVKKTEVQTGGFSKESILPKRNSDKLIARKKDWDPKKYGGFDSPTVAYSVLVVAKVEKGKSKKLKSVKELLGITIMERSSFEKNPIDFLEAKGYKEVKKDLIIKLPKYSLFELENGRKRMLASAGELQKGNELALPSKYVNFLYLASHYEKLKGSPEDNEQKQLFVEQHKHYLDEIIEQISEFSKRVILADANLDKVLSAYNKHRDKPIREQAENIIHLFTLTNLGAPAAFKYFDTTIDRKRYTSTKEVLDATLIHQSITGLYETRIDLSQLGGDGGEAAAKGGGGSEAAAKGGTAPLEEEYRLFLEAPIQNVTLLEQWKREIPKVWAEINPPGLASTQAPIHVQLLSTALPVRVRQYPITLEAKRSLRETIRKFRAAGILRPVHSPWNTPLLPVRKSGTSEYRMVQDLREVNKRVETIHPTVPNPYTLLSLLPPDRIWYSVLDLKDAFFCIPLAPESQLIFAFEWADAEEGESGQLTWTRLPQGFKNSPTLFDEALNRDLQGFRLDHPSVSLLQYVDDLLIAADTQAACLSATRDLLMTLAELGYRVSGKKAQLCQEEVTYLGFKIHKGSRSLSNSRTQAILQIPVPKTKRQVREFLGTIGYCRLWIPGFAELAQPLYAATRGGNDPLVWGEKEEEAFQSLKLALTQPPALALPSLDKPFQLFVEETSGAAKGVLTQALGPWKRPVAYLSKRLDPVAAGWPRCLRAIAAAALLTREASKLTFGQDIEITSSHNLESLLRSPPDKWLTNARITQYQVLLLDPPRVRFKQTAALNPATLLPETDDTLPIHHCLDTLDSLTSTRPDLTDQPLAQAEATLFTDGSSYIRDGKRYAGAAVVTLDSVIWAEPLPIGTSAQKAELIALTKALEWSKDKSVNIYTDSRYAFATLHVHGMIYRERGLLTAGGKAIKNAPEILALLTAVWLPKRVAVMHCKGHQKDDAPTSTGNRRADEVAREVAIRPLSTQATISAGKRTADGSEFEKRTADGSEFESPKKKAKVE

SEQ ID NO: 7681 - protein, 2098 aa, synthetic construct
MPAAKRVKLDGGDKKYSIGLDIGTNSVGWAVITDEYKVPSKKFKVLGNTDRHSIKKNLIGALLFDSGETAEATRLKRTARRRYTRRKNRICYLQEIFSNEMAKVDDSFFHRLEESFLVEEDKKHERHPIFGNIVDEVAYHEKYPTIYHLRKKLVDSTDKADLRLIYLALAHMIKFRGHFLIEGDLNPDNSDVDKLFIQLVQTYNQLFEENPINASGVDAKAILSARLSKSRRLENLIAQLPGEKKNGLFGNLIALSLGLTPNFKSNFDLAEDAKLQLSKDTYDDDLDNLLAQIGDQYADLFLAAKNLSDAILLSDILRVNTEITKAPLSASMIKRYDEHHQDLTLLKALVRQQLPEKYKEIFFDQSKNGYAGYIDGGASQEEFYKFIKPILEKMDGTEELLVKLNREDLLRKQRTFDNGSIPHQIHLGELHAILRRQEDFYPFLKDNREKIEKILTFRIPYYVGPLARGNSRFAWMTRKSEETITPWNFEEVVDKGASAQSFIERMTNFDKNLPNEKVLPKHSLLYEYFTVYNELTKVKYVTEGMRKPAFLSGEQKKAIVDLLFKTNRKVTVKQLKEDYFKKIECFDSVEISGVEDRFNASLGTYHDLLKIIKDKDFLDNEENEDILEDIVLTLTLFEDREMIEERLKTYAHLFDDKVMKQLKRRRYTGWGRLSRKLINGIRDKQSGKTILDFLKSDGFANRNFMQLIHDDSLTFKEDIQKAQVSGQGDSLHEHIANLAGSPAIKKGILQTVKVVDELVKVMGRHKPENIVIEMARENQTTQKGQKNSRERMKRIEEGIKELGSQILKEHPVENTQLQNEKLYLYYLQNGRDMYVDQELDINRLSDYDVDHIVPQSFLKDDSIDNKVLTRSDKARGKSDNVPSEEVVKKMKNYWRQLLNAKLITQRKFDNLTKAERGGLSELDKAGFIKRQLVETRQITKHVAQILDSRMNTKYDENDKLIREVKVITLKSKLVSDFRKDFQFYKVREINNYHHAHDAYLNAVVGTALIKKYPKLESEFVYGDYKVYDVRKMIAKSEQEIGKATAKYFFYSNIMNFFKTEITLANGEIRKRPLIETNGETGEIVWDKGRDFATVRKVLSMPQVNIVKKTEVQTGGFSKESILPKRNSDKLIARKKDWDPKKYGGFDSPTVAYSVLVVAKVEKGKSKKLKSVKELLGITIMERSSFEKNPIDFLEAKGYKEVKKDLIIKLPKYSLFELENGRKRMLASAGELQKGNELALPSKYVNFLYLASHYEKLKGSPEDNEQKQLFVEQHKHYLDEIIEQISEFSKRVILADANLDKVLSAYNKHRDKPIREQAENIIHLFTLTNLGAPAAFKYFDTTIDRKRYTSTKEVLDATLIHQSITGLYETRIDLSQLGGDGGEAAAKGGGGSEAAAKGGVLNLEEEYRLHEKPVPSSIDPSWLQLFPTVWAERAGMGLANQVPPVVVELRSGASPVAVRQYPMSKEAREGIRPHIQKFLDLGVLVPCRSPWNTPLLPVKKPGTNDYRPVQDLREINKRVQDIHPTVPNPYNLLSSLPPSYTWYSVLDLKDAFFCLRLHPNSQPLFAFEWKDPEKGNTGQLTWTRLPQGFKNSPTLFNEALHRDLAPFRALNPQVVLLQYVDDLLVAAPTYEDCKKGTQKLLQELSKLGYRVSAKKAQLCQREVTYLGYLLKEGKRWLTPARKATVMKIPVPTTPRQVREFLGTAGFCRLWIPGFASLAAPLYPLTKPSIPFIWTEEHQQAFDHIKKALLSAPALALPDLTKPFTLYIDERAGVARGVLTQTLGPWRRPVAYLSKKLDPVASGWPTCLKAVAAVALLLKDADKLTLGQNVTVIASHSLESIVRQPPDRWMTNARMTHYQSLLLNERVSFAPPAVLNPATLLPVESEATPVHRCSEILAEETGTRRDLEDQPLPGVPTWYTDGSSFITEGKRRAGAPIVDGKRTVWASSLPEGTSAQKAELVALTQALRLAEGKNINIYTDSRYAFATAHIHGAIYKQRGWLTSAGKDIKNKEEILALLEAIHLPRRVAIIHCPGHQRGSNPVATGNRRADEAAKQAALSTRVLAGTTKPAGKRTADGSEFEKRTADGSEFESPKKKAKVE

SEQ ID NO: 7682 - protein, 2222 aa, synthetic construct
MPAAKRVKLDGGDKKYSIGLDIGTNSVGWAVITDEYKVPSKKFKVLGNTDRHSIKKNLIGALLFDSGETAEATRLKRTARRRYTRRKNRICYLQEIFSNEMAKVDDSFFHRLEESFLVEEDKKHERHPIFGNIVDEVAYHEKYPTIYHLRKKLVDSTDKADLRLIYLALAHMIKFRGHFLIEGDLNPDNSDVDKLFIQLVQTYNQLFEENPINASGVDAKAILSARLSKSRRLENLIAQLPGEKKNGLFGNLIALSLGLTPNFKSNFDLAEDAKLQLSKDTYDDDLDNLLAQIGDQYADLFLAAKNLSDAILLSDILRVNTEITKAPLSASMIKRYDEHHQDLTLLKALVRQQLPEKYKEIFFDQSKNGYAGYIDGGASQEEFYKFIKPILEKMDGTEELLVKLNREDLLRKQRTFDNGSIPHQIHLGELHAILRRQEDFYPFLKDNREKIEKILTFRIPYYVGPLARGNSRFAWMTRKSEETITPWNFEEVVDKGASAQSFIERMTNFDKNLPNEKVLPKHSLLYEYFTVYNELTKVKYVTEGMRKPAFLSGEQKKAIVDLLFKTNRKVTVKQLKEDYFKKIECFDSVEISGVEDRFNASLGTYHDLLKIIKDKDFLDNEENEDILEDIVLTLTLFEDREMIEERLKTYAHLFDDKVMKQLKRRRYTGWGRLSRKLINGIRDKQSGKTILDFLKSDGFANRNFMQLIHDDSLTFKEDIQKAQVSGQGDSLHEHIANLAGSPAIKKGILQTVKVVDELVKVMGRHKPENIVIEMARENQTTQKGQKNSRERMKRIEEGIKELGSQILKEHPVENTQLQNEKLYLYYLQNGRDMYVDQELDINRLSDYDVDHIVPQSFLKDDSIDNKVLTRSDKARGKSDNVPSEEVVKKMKNYWRQLLNAKLITQRKFDNLTKAERGGLSELDKAGFIKRQLVETRQITKHVAQILDSRMNTKYDENDKLIREVKVITLKSKLVSDFRKDFQFYKVREINNYHHAHDAYLNAVVGTALIKKYPKLESEFVYGDYKVYDVRKMIAKSEQEIGKATAKYFFYSNIMNFFKTEITLANGEIRKRPLIETNGETGEIVWDKGRDFATVRKVLSMPQVNIVKKTEVQTGGFSKESILPKRNSDKLIARKKDWDPKKYGGFDSPTVAYSVLVVAKVEKGKSKKLKSVKELLGITIMERSSFEKNPIDFLEAKGYKEVKKDLIIKLPKYSLFELENGRKRMLASAGELQKGNELALPSKYVNFLYLASHYEKLKGSPEDNEQKQLFVEQHKHYLDEIIEQISEFSKRVILADANLDKVLSAYNKHRDKPIREQAENIIHLFTLTNLGAPAAFKYFDTTIDRKRYTSTKEVLDATLIHQSITGLYETRIDLSQLGGDGGEAAAKGGGGSEAAAKGGTLGDQGSRGSDPLPEPRVTLTVEGIPTEFLVNTGAEHSVLTKPMGKMGSKRTVVAGATGSKVYPWTTKRLLKIGQKQVTHSFLVIPECPAPLLGRDLLTKLKAQIQFSTEGPQVTWEDRPAMCLVLNLEEEYRLHEKPVPPSIDPSWLQLFPMVWAEKAGMGLANQVPPVVVELKSDASPVAVRQYPMSKEAREGIRPHIQRFLDLGILVPCQSPWNTPLLPVKKPGTNDYRPVQDLREVNKRVQDIHPTVPNPYNLLSSLPPSHTWYSVLDLKDAFFCLKLHPNSQPLFAFEWRDPEKGNTGQLTWTRLPQGFKNSPTLFNEALHRDLASFRALNPQVVMLQYVDDLLVAAPTYRDCKEGTRRLLQELSKLGYRVSAKKAQLCREEVTYLGYLLKGGKRWLTPARKATVMKIPTPTTPRQVREFLGTAGFCRLWIPGFASLAAPLYPLTRPKVPFTWTEAHQEAFGRIKEALLSAPALALPDLTKPFALYVDEKEGVARGVLTQTLGPWRRPVAYLSKKLDPVASGWPTCLKAIAAVALLLKDADKLTLGQNVLVIAPHNLESIVRQPPDRWMTNARMTHYQSLLLNERVSFAPPAILNPATLLPVESDDTPIHICSEILAEETGTRPDLRDQPLPGVPAWYTDGSSFIMDGRRQAGAAIVDNKRTVWASNLPEGTSAQKAELIALTQALRLAEGKSINIYTDSRYAFATAHVHGAIYKQRGWLTSAGKDIKNKEEILALLEAIHLPKRVAIIHCPGHQRGTDPVATGNRKADEAAKQAAQSTRILTETTKNAGKRTADGSEFEKRTADGSEFESPKKKAKVE

SEQ ID NO: 7683 - protein, 2100 aa, synthetic construct
MPAAKRVKLDGGDKKYSIGLDIGTNSVGWAVITDEYKVPSKKFKVLGNTDRHSIKKNLIGALLFDSGETAEATRLKRTARRRYTRRKNRICYLQEIFSNEMAKVDDSFFHRLEESFLVEEDKKHERHPIFGNIVDEVAYHEKYPTIYHLRKKLVDSTDKADLRLIYLALAHMIKFRGHFLIEGDLNPDNSDVDKLFIQLVQTYNQLFEENPINASGVDAKAILSARLSKSRRLENLIAQLPGEKKNGLFGNLIALSLGLTPNFKSNFDLAEDAKLQLSKDTYDDDLDNLLAQIGDQYADLFLAAKNLSDAILLSDILRVNTEITKAPLSASMIKRYDEHHQDLTLLKALVRQQLPEKYKEIFFDQSKNGYAGYIDGGASQEEFYKFIKPILEKMDGTEELLVKLNREDLLRKQRTFDNGSIPHQIHLGELHAILRRQEDFYPFLKDNREKIEKILTFRIPYYVGPLARGNSRFAWMTRKSEETITPWNFEEVVDKGASAQSFIERMTNFDKNLPNEKVLPKHSLLYEYFTVYNELTKVKYVTEGMRKPAFLSGEQKKAIVDLLFKTNRKVTVKQLKEDYFKKIECFDSVEISGVEDRFNASLGTYHDLLKIIKDKDFLDNEENEDILEDIVLTLTLFEDREMIEERLKTYAHLFDDKVMKQLKRRRYTGWGRLSRKLINGIRDKQSGKTILDFLKSDGFANRNFMQLIHDDSLTFKEDIQKAQVSGQGDSLHEHIANLAGSPAIKKGILQTVKVVDELVKVMGRHKPENIVIEMARENQTTQKGQKNSRERMKRIEEGIKELGSQILKEHPVENTQLQNEKLYLYYLQNGRDMYVDQELDINRLSDYDVDHIVPQSFLKDDSIDNKVLTRSDKARGKSDNVPSEEVVKKMKNYWRQLLNAKLITQRKFDNLTKAERGGLSELDKAGFIKRQLVETRQITKHVAQILDSRMNTKYDENDKLIREVKVITLKSKLVSDFRKDFQFYKVREINNYHHAHDAYLNAVVGTALIKKYPKLESEFVYGDYKVYDVRKMIAKSEQEIGKATAKYFFYSNIMNFFKTEITLANGEIRKRPLIETNGETGEIVWDKGRDFATVRKVLSMPQVNIVKKTEVQTGGFSKESILPKRNSDKLIARKKDWDPKKYGGFDSPTVAYSVLVVAKVEKGKSKKLKSVKELLGITIMERSSFEKNPIDFLEAKGYKEVKKDLIIKLPKYSLFELENGRKRMLASAGELQKGNELALPSKYVNFLYLASHYEKLKGSPEDNEQKQLFVEQHKHYLDEIIEQISEFSKRVILADANLDKVLSAYNKHRDKPIREQAENIIHLFTLTNLGAPAAFKYFDTTIDRKRYTSTKEVLDATLIHQSITGLYETRIDLSQLGGDGGEAAAKGGGGSEAAAKGGTLNLEDEYRLYETSAEPEVSPGSTWLSDFPQAWAETGGMGLAVRQAPLIIPLKATSTPVSIKQYPMSQEAKLGIKPHIQRLLDQGILVPCQSPWNTPLLPVKKPGTNDYRPVQDLREVNKRVEDIHPTVPNPYNLLSGLPPSHRWYTVLDLKDAFFCLRLHPTSQPLFAFEWRDPGMGISGQLTWTRLPQGFKNSPTLFNEALHRDLADFRIQHPDLILLQYVDDILLAATSELDCQQGTRALLLTLGNLGYRASAKKAQLCQKQVKYLGYLLKEGQRWLTEARKETVMGQPTPKTPRQLREFLGTAGFCRLWIPGFAEMAAPLYPLTKPGTLFNWGPDQQKAYQEIKQALLTAPALGLPDLTKPFELFVDEKQGYAKGVLTQKLGPWRRPVAYLSKKLDPVAAGWPPCLRMVAAIAVLRKDAGKLTMGQPLVILAPHAVEALVKQPPDRWLSNARMTHYQAMLLDTDRVQFGPVVALNPATLLPLPEEGAPHDCLEILAETHGTRPDLTDQPIPDADHTWYTDGSSFLQEGQRKAGAAVTTETEVIWARALPAGTSAQRAELIALTQALKMAEGKRLNVYTDSRYAFATAHIHGEIYRRRGWLTSEGREIKNKSEILALLKALFLPKRLSIIHCLGHQKGDSAEARGNRLADQAAREAAIKTPPDTSTLLAGKRTADGSEFEKRTADGSEFESPKKKAKVE

SEQ ID NO: 7684 - protein, 2100 aa, synthetic construct
MPAAKRVKLDGGDKKYSIGLDIGTNSVGWAVITDEYKVPSKKFKVLGNTDRHSIKKNLIGALLFDSGETAEATRLKRTARRRYTRRKNRICYLQEIFSNEMAKVDDSFFHRLEESFLVEEDKKHERHPIFGNIVDEVAYHEKYPTIYHLRKKLVDSTDKADLRLIYLALAHMIKFRGHFLIEGDLNPDNSDVDKLFIQLVQTYNQLFEENPINASGVDAKAILSARLSKSRRLENLIAQLPGEKKNGLFGNLIALSLGLTPNFKSNFDLAEDAKLQLSKDTYDDDLDNLLAQIGDQYADLFLAAKNLSDAILLSDILRVNTEITKAPLSASMIKRYDEHHQDLTLLKALVRQQLPEKYKEIFFDQSKNGYAGYIDGGASQEEFYKFIKPILEKMDGTEELLVKLNREDLLRKQRTFDNGSIPHQIHLGELHAILRRQEDFYPFLKDNREKIEKILTFRIPYYVGPLARGNSRFAWMTRKSEETITPWNFEEVVDKGASAQSFIERMTNFDKNLPNEKVLPKHSLLYEYFTVYNELTKVKYVTEGMRKPAFLSGEQKKAIVDLLFKTNRKVTVKQLKEDYFKKIECFDSVEISGVEDRFNASLGTYHDLLKIIKDKDFLDNEENEDILEDIVLTLTLFEDREMIEERLKTYAHLFDDKVMKQLKRRRYTGWGRLSRKLINGIRDKQSGKTILDFLKSDGFANRNFMQLIHDDSLTFKEDIQKAQVSGQGDSLHEHIANLAGSPAIKKGILQTVKVVDELVKVMGRHKPENIVIEMARENQTTQKGQKNSRERMKRIEEGIKELGSQILKEHPVENTQLQNEKLYLYYLQNGRDMYVDQELDINRLSDYDVDHIVPQSFLKDDSIDNKVLTRSDKARGKSDNVPSEEVVKKMKNYWRQLLNAKLITQRKFDNLTKAERGGLSELDKAGFIKRQLVETRQITKHVAQILDSRMNTKYDENDKLIREVKVITLKSKLVSDFRKDFQFYKVREINNYHHAHDAYLNAVVGTALIKKYPKLESEFVYGDYKVYDVRKMIAKSEQEIGKATAKYFFYSNIMNFFKTEITLANGEIRKRPLIETNGETGEIVWDKGRDFATVRKVLSMPQVNIVKKTEVQTGGFSKESILPKRNSDKLIARKKDWDPKKYGGFDSPTVAYSVLVVAKVEKGKSKKLKSVKELLGITIMERSSFEKNPIDFLEAKGYKEVKKDLIIKLPKYSLFELENGRKRMLASAGELQKGNELALPSKYVNFLYLASHYEKLKGSPEDNEQKQLFVEQHKHYLDEIIEQISEFSKRVILADANLDKVLSAYNKHRDKPIREQAENIIHLFTLTNLGAPAAFKYFDTTIDRKRYTSTKEVLDATLIHQSITGLYETRIDLSQLGGDGGEAAAKGGGGSEAAAKGGTLGIEDEYRLHETSTEPDVSLGSTWLSDFPQAWAETGGMGLAVRQAPLIIPLKATSTPVSIQQYPMSHEARLGIKPHIQRLLDQGILVPCQSPWNTPLLPVKKPGTNDYRPVQDLREVNKRVEDIHPTVPNPYNLLSGLPPSHQWYTVLDLKDAFFCLRLHPTSQPLFAFEWRDPGMGISGQLTWTRLPQGFKNSPTLFNEALHRDLADFRIQHPDLILLQYVDDILLAATSELDCQQGTRALLQTLGDLGYRASAKKAQICQKQVKYLGYLLREGQRWLTEARKETVMGQPVPKTPRQLREFLGTAGFCRLWIPGFAEMAAPLYPLTKPGTLFSWGPDQQKAYQEIKQALLTAPALGLPDLTKPFELFVDEKQGYAKGVLTQKLGPWRRPVAYLSKKLDPVAAGWPPCLRMVAAIAVLTKDAGKLTMGQPLVILAPHAVEALVKQPPDRWLSNARMTHYQAMLLDTDRVQFGPVVALNPATLLPLPEEGAPHDCLEILAETHGTRPDLTDQPIPDADHTWYTDGSSFLQEGQRKAGAAVTTETEVIWAGALPAGTSAQRAELIALTQALKMAEGKRLNVYTDSRYAFATAHIHGEIYRRRGWLTSEGREIKNKSEILALLKALFLPKRLSIIHCLGHQKGDSAEARGNRLADQAAREAAIKTPPDTSTLLAGKRTADGSEFEKRTADGSEFESPKKKAKVE

SEQ ID NO: 7685 - protein, 2100 aa, synthetic construct
MPAAKRVKLDGGDKKYSIGLDIGTNSVGWAVITDEYKVPSKKFKVLGNTDRHSIKKNLIGALLFDSGETAEATRLKRTARRRYTRRKNRICYLQEIFSNEMAKVDDSFFHRLEESFLVEEDKKHERHPIFGNIVDEVAYHEKYPTIYHLRKKLVDSTDKADLRLIYLALAHMIKFRGHFLIEGDLNPDNSDVDKLFIQLVQTYNQLFEENPINASGVDAKAILSARLSKSRRLENLIAQLPGEKKNGLFGNLIALSLGLTPNFKSNFDLAEDAKLQLSKDTYDDDLDNLLAQIGDQYADLFLAAKNLSDAILLSDILRVNTEITKAPLSASMIKRYDEHHQDLTLLKALVRQQLPEKYKEIFFDQSKNGYAGYIDGGASQEEFYKFIKPILEKMDGTEELLVKLNREDLLRKQRTFDNGSIPHQIHLGELHAILRRQEDFYPFLKDNREKIEKILTFRIPYYVGPLARGNSRFAWMTRKSEETITPWNFEEVVDKGASAQSFIERMTNFDKNLPNEKVLPKHSLLYEYFTVYNELTKVKYVTEGMRKPAFLSGEQKKAIVDLLFKTNRKVTVKQLKEDYFKKIECFDSVEISGVEDRFNASLGTYHDLLKIIKDKDFLDNEENEDILEDIVLTLTLFEDREMIEERLKTYAHLFDDKVMKQLKRRRYTGWGRLSRKLINGIRDKQSGKTILDFLKSDGFANRNFMQLIHDDSLTFKEDIQKAQVSGQGDSLHEHIANLAGSPAIKKGILQTVKVVDELVKVMGRHKPENIVIEMARENQTTQKGQKNSRERMKRIEEGIKELGSQILKEHPVENTQLQNEKLYLYYLQNGRDMYVDQELDINRLSDYDVDHIVPQSFLKDDSIDNKVLTRSDKARGKSDNVPSEEVVKKMKNYWRQLLNAKLITQRKFDNLTKAERGGLSELDKAGFIKRQLVETRQITKHVAQILDSRMNTKYDENDKLIREVKVITLKSKLVSDFRKDFQFYKVREINNYHHAHDAYLNAVVGTALIKKYPKLESEFVYGDYKVYDVRKMIAKSEQEIGKATAKYFFYSNIMNFFKTEITLANGEIRKRPLIETNGETGEIVWDKGRDFATVRKVLSMPQVNIVKKTEVQTGGFSKESILPKRNSDKLIARKKDWDPKKYGGFDSPTVAYSVLVVAKVEKGKSKKLKSVKELLGITIMERSSFEKNPIDFLEAKGYKEVKKDLIIKLPKYSLFELENGRKRMLASAGELQKGNELALPSKYVNFLYLASHYEKLKGSPEDNEQKQLFVEQHKHYLDEIIEQISEFSKRVILADANLDKVLSAYNKHRDKPIREQAENIIHLFTLTNLGAPAAFKYFDTTIDRKRYTSTKEVLDATLIHQSITGLYETRIDLSQLGGDGGEAAAKGGGGSEAAAKGGTLNIEDEYRLHETSKGPDVPLGSTWLSDFPQAWAETGGMGLAVRQAPLIIPLKATSTPVSIKQYPMSQEARLGIKPHIQRLLDQGILVPCQSPWNTPLLPVKKPGTNDYRPVQDLREVNKRVEDIHPTVPNPYNLLSGLPPSHQWYTVLDLKDAFFCLRLHPTSQSLFAFEWRDPEMGISGQLTWTRLPQGFKNSPTLFNEALHRDLADFRIQHPDLILLQYVDDLLLAATSELDCQQGTRALLQTLGDLGYRASAKKAQICQKQVKYLGYLLKEGQRWLTEARKETVMGQPTPKTPRQLREFLGTAGFCRLWIPGFAEMAAPLYPLTKPGTLFEWGPDQQKAYQEIKQALLTAPALGLPDLTKPFELFVDEKQGYAKGVLTQKLGPWRRPVAYLSKKLDPVAAGWPPCLRMVAAIAVLTKDAGKLTMGQPLVILAPHAVEALVKQPPDRWLSNARMTHYQALLLDTDRVQFGPIVALNPATLLPLPEEGLQHDCLDILAEAHGTRPDLTDQPLPDADHTWYTDGSSFLQEGQRKAGAAVTTETEVVWAKALPAGTSAQRAELIALTQALKMAEGKKLNVYTDSRYAFATAHIHGEIYRRRGWLTSEGKEIKNKDEILALLKALFLPKRLSIIHCPGHQKGNRAEARGNRMADQAAREVATRETPETSTLLAGKRTADGSEFEKRTADGSEFESPKKKAKVE

SEQ ID NO: 7686 - protein, 2100 aa, synthetic construct
MPAAKRVKLDGGDKKYSIGLDIGTNSVGWAVITDEYKVPSKKFKVLGNTDRHSIKKNLIGALLFDSGETAEATRLKRTARRRYTRRKNRICYLQEIFSNEMAKVDDSFFHRLEESFLVEEDKKHERHPIFGNIVDEVAYHEKYPTIYHLRKKLVDSTDKADLRLIYLALAHMIKFRGHFLIEGDLNPDNSDVDKLFIQLVQTYNQLFEENPINASGVDAKAILSARLSKSRRLENLIAQLPGEKKNGLFGNLIALSLGLTPNFKSNFDLAEDAKLQLSKDTYDDDLDNLLAQIGDQYADLFLAAKNLSDAILLSDILRVNTEITKAPLSASMIKRYDEHHQDLTLLKALVRQQLPEKYKEIFFDQSKNGYAGYIDGGASQEEFYKFIKPILEKMDGTEELLVKLNREDLLRKQRTFDNGSIPHQIHLGELHAILRRQEDFYPFLKDNREKIEKILTFRIPYYVGPLARGNSRFAWMTRKSEETITPWNFEEVVDKGASAQSFIERMTNFDKNLPNEKVLPKHSLLYEYFTVYNELTKVKYVTEGMRKPAFLSGEQKKAIVDLLFKTNRKVTVKQLKEDYFKKIECFDSVEISGVEDRFNASLGTYHDLLKIIKDKDFLDNEENEDILEDIVLTLTLFEDREMIEERLKTYAHLFDDKVMKQLKRRRYTGWGRLSRKLINGIRDKQSGKTILDFLKSDGFANRNFMQLIHDDSLTFKEDIQKAQVSGQGDSLHEHIANLAGSPAIKKGILQTVKVVDELVKVMGRHKPENIVIEMARENQTTQKGQKNSRERMKRIEEGIKELGSQILKEHPVENTQLQNEKLYLYYLQNGRDMYVDQELDINRLSDYDVDHIVPQSFLKDDSIDNKVLTRSDKARGKSDNVPSEEVVKKMKNYWRQLLNAKLITQRKFDNLTKAERGGLSELDKAGFIKRQLVETRQITKHVAQILDSRMNTKYDENDKLIREVKVITLKSKLVSDFRKDFQFYKVREINNYHHAHDAYLNAVVGTALIKKYPKLESEFVYGDYKVYDVRKMIAKSEQEIGKATAKYFFYSNIMNFFKTEITLANGEIRKRPLIETNGETGEIVWDKGRDFATVRKVLSMPQVNIVKKTEVQTGGFSKESILPKRNSDKLIARKKDWDPKKYGGFDSPTVAYSVLVVAKVEKGKSKKLKSVKELLGITIMERSSFEKNPIDFLEAKGYKEVKKDLIIKLPKYSLFELENGRKRMLASAGELQKGNELALPSKYVNFLYLASHYEKLKGSPEDNEQKQLFVEQHKHYLDEIIEQISEFSKRVILADANLDKVLSAYNKHRDKPIREQAENIIHLFTLTNLGAPAAFKYFDTTIDRKRYTSTKEVLDATLIHQSITGLYETRIDLSQLGGDGGEAAAKGGGGSEAAAKGGTLNIEDEYRLHEISTEPDVSPGSTWLSDFPQAWAETGGMGLAVRQAPLIIPLKATSTPVSIKQYPMSQEAKLGIKPHIQRLLDQGILVPCQSPWNTPLLPVKKPGTNDYRPVQGLREVNKRVEDIHPTVPNPYNLLSGLPTSHRWYTVLDLKDAFFCLRLHPTSQPLFASEWRDPGMGISGQLTWTRLPQGFKNSPTLFNEALHRGLADFRIQHPDLILLQYVDDLLLAATSELDCQQGTRALLKTLGNLGYRASAKKAQICQKQVKYLGYLLREGQRWLTEARKETVMGQPTPKTPRQLREFLGKAGFCRLFIPRFAEMAAPLYPLTKPGTLFNWGPDQQKAYHEIKQALLTAPALGLPDLTKPFELFVDEKQGYAKGVLTQKLGPWRRPVAYLSKKLDPVAAGWPPCLRMVAAIAVLTKDAGKLTMGQPLVILAPHAVEALVKQPPDRWLSNARMTHYQAMLLDTDRVQFGPVVALNPATLLPLPEEGAPHDCLEILAETHGTEPDLTDQPIPDADHTWYTDGSSFLQEGQRKAGAAVTTETEVIWARALPAGTSAQRAELIALTQALKMAEGKRLNVYTDSRYAFATAHIHGEIYKRRGWLTSEGREIKNKSEILALLKALFLPKRLSIIHCLGHQKGDSAEARGNRLADQAAREAAIKTPPDTSTLLAGKRTADGSEFEKRTADGSEFESPKKKAKVE

SEQ ID NO: 7687 - protein, 2098 aa, synthetic construct
MPAAKRVKLDGGDKKYSIGLDIGTNSVGWAVITDEYKVPSKKFKVLGNTDRHSIKKNLIGALLFDSGETAEATRLKRTARRRYTRRKNRICYLQEIFSNEMAKVDDSFFHRLEESFLVEEDKKHERHPIFGNIVDEVAYHEKYPTIYHLRKKLVDSTDKADLRLIYLALAHMIKFRGHFLIEGDLNPDNSDVDKLFIQLVQTYNQLFEENPINASGVDAKAILSARLSKSRRLENLIAQLPGEKKNGLFGNLIALSLGLTPNFKSNFDLAEDAKLQLSKDTYDDDLDNLLAQIGDQYADLFLAAKNLSDAILLSDILRVNTEITKAPLSASMIKRYDEHHQDLTLLKALVRQQLPEKYKEIFFDQSKNGYAGYIDGGASQEEFYKFIKPILEKMDGTEELLVKLNREDLLRKQRTFDNGSIPHQIHLGELHAILRRQEDFYPFLKDNREKIEKILTFRIPYYVGPLARGNSRFAWMTRKSEETITPWNFEEVVDKGASAQSFIERMTNFDKNLPNEKVLPKHSLLYEYFTVYNELTKVKYVTEGMRKPAFLSGEQKKAIVDLLFKTNRKVTVKQLKEDYFKKIECFDSVEISGVEDRFNASLGTYHDLLKIIKDKDFLDNEENEDILEDIVLTLTLFEDREMIEERLKTYAHLFDDKVMKQLKRRRYTGWGRLSRKLINGIRDKQSGKTILDFLKSDGFANRNFMQLIHDDSLTFKEDIQKAQVSGQGDSLHEHIANLAGSPAIKKGILQTVKVVDELVKVMGRHKPENIVIEMARENQTTQKGQKNSRERMKRIEEGIKELGSQILKEHPVENTQLQNEKLYLYYLQNGRDMYVDQELDINRLSDYDVDHIVPQSFLKDDSIDNKVLTRSDKARGKSDNVPSEEVVKKMKNYWRQLLNAKLITQRKFDNLTKAERGGLSELDKAGFIKRQLVETRQITKHVAQILDSRMNTKYDENDKLIREVKVITLKSKLVSDFRKDFQFYKVREINNYHHAHDAYLNAVVGTALIKKYPKLESEFVYGDYKVYDVRKMIAKSEQEIGKATAKYFFYSNIMNFFKTEITLANGEIRKRPLIETNGETGEIVWDKGRDFATVRKVLSMPQVNIVKKTEVQTGGFSKESILPKRNSDKLIARKKDWDPKKYGGFDSPTVAYSVLVVAKVEKGKSKKLKSVKELLGITIMERSSFEKNPIDFLEAKGYKEVKKDLIIKLPKYSLFELENGRKRMLASAGELQKGNELALPSKYVNFLYLASHYEKLKGSPEDNEQKQLFVEQHKHYLDEIIEQISEFSKRVILADANLDKVLSAYNKHRDKPIREQAENIIHLFTLTNLGAPAAFKYFDTTIDRKRYTSTKEVLDATLIHQSITGLYETRIDLSQLGGDGGEAAAKGGGGSEAAAKGGVLNLEEEYRLHEKPVPSSIDPSWLQLFPTVWAERAGMGLANQVPPVVVELRSGASPVAVRQYPMSKEAREGIRPHIQRFLDLGVLVPCQSPWNTPLLPVKKPGTNDYRPVQDLREINKRVQDIHPTVPNPYNLLSSLPPSHTWYSVLDLKDAFFCLKLHPNSQPLFAFEWRDPEKGNTGQLTWTRLPQGFKNSPTLFNEALHRDLAPFRALNPQVVLLQYVDDLLVAAPTYRDCKEGTQKLLQELSKLGYRVSAKKAQLCQKEVTYLGYLLKEGKRWLTPARKATVMKIPPPTTPRQVREFLGTAGFCRLWIPGFASLAAPLYPLTKPSIPFIWTEEHQKAFDRIKEALLSAPALALPDLTKPFTLYVDERAGVARGVLTQTLGPWRRPVAYLSKKLDPVASGWPTCLKAVAAVALLLKDADKLTLGQNVTVIASHSLESIVRQPPDRWMTNARMTHYQSLLLNERVSFAPPAVLNPATLLPVESEATPVHRCSEILAEETGTRRDLKDQPLPGVPAWYTDGSSFIAEGKRRAGAAIVDGKRTVWASSLPEGTSAQKAELVALTQALRLAEGKDINIYTDSRYAFATAHIHGAIYKQRGWLTSAGKDIKNKEEILALLEAIHLPKRVAIIHCPGHQKGNDPVATGNRRADEAAKQAALSTRVLAETTKPAGKRTADGSEFEKRTADGSEFESPKKKAKVE

SEQ ID NO: 7688 - protein, 2100 aa, synthetic construct
MPAAKRVKLDGGDKKYSIGLDIGTNSVGWAVITDEYKVPSKKFKVLGNTDRHSIKKNLIGALLFDSGETAEATRLKRTARRRYTRRKNRICYLQEIFSNEMAKVDDSFFHRLEESFLVEEDKKHERHPIFGNIVDEVAYHEKYPTIYHLRKKLVDSTDKADLRLIYLALAHMIKFRGHFLIEGDLNPDNSDVDKLFIQLVQTYNQLFEENPINASGVDAKAILSARLSKSRRLENLIAQLPGEKKNGLFGNLIALSLGLTPNFKSNFDLAEDAKLQLSKDTYDDDLDNLLAQIGDQYADLFLAAKNLSDAILLSDILRVNTEITKAPLSASMIKRYDEHHQDLTLLKALVRQQLPEKYKEIFFDQSKNGYAGYIDGGASQEEFYKFIKPILEKMDGTEELLVKLNREDLLRKQRTFDNGSIPHQIHLGELHAILRRQEDFYPFLKDNREKIEKILTFRIPYYVGPLARGNSRFAWMTRKSEETITPWNFEEVVDKGASAQSFIERMTNFDKNLPNEKVLPKHSLLYEYFTVYNELTKVKYVTEGMRKPAFLSGEQKKAIVDLLFKTNRKVTVKQLKEDYFKKIECFDSVEISGVEDRFNASLGTYHDLLKIIKDKDFLDNEENEDILEDIVLTLTLFEDREMIEERLKTYAHLFDDKVMKQLKRRRYTGWGRLSRKLINGIRDKQSGKTILDFLKSDGFANRNFMQLIHDDSLTFKEDIQKAQVSGQGDSLHEHIANLAGSPAIKKGILQTVKVVDELVKVMGRHKPENIVIEMARENQTTQKGQKNSRERMKRIEEGIKELGSQILKEHPVENTQLQNEKLYLYYLQNGRDMYVDQELDINRLSDYDVDHIVPQSFLKDDSIDNKVLTRSDKARGKSDNVPSEEVVKKMKNYWRQLLNAKLITQRKFDNLTKAERGGLSELDKAGFIKRQLVETRQITKHVAQILDSRMNTKYDENDKLIREVKVITLKSKLVSDFRKDFQFYKVREINNYHHAHDAYLNAVVGTALIKKYPKLESEFVYGDYKVYDVRKMIAKSEQEIGKATAKYFFYSNIMNFFKTEITLANGEIRKRPLIETNGETGEIVWDKGRDFATVRKVLSMPQVNIVKKTEVQTGGFSKESILPKRNSDKLIARKKDWDPKKYGGFDSPTVAYSVLVVAKVEKGKSKKLKSVKELLGITIMERSSFEKNPIDFLEAKGYKEVKKDLIIKLPKYSLFELENGRKRMLASAGELQKGNELALPSKYVNFLYLASHYEKLKGSPEDNEQKQLFVEQHKHYLDEIIEQISEFSKRVILADANLDKVLSAYNKHRDKPIREQAENIIHLFTLTNLGAPAAFKYFDTTIDRKRYTSTKEVLDATLIHQSITGLYETRIDLSQLGGDGGEAAAKGGGGSEAAAKGGTLNIEDEYRLHETSKEPDVPLGSTWLSDFPQAWAETGGMGLAVRQAPLIIPLKATSTPVSIKQYPMSQEARLGIKPHIQRLLDQGILVPCQSPWNTPLLPVKKPGTNDYRPVQDLREVNKRVEDIHPTVPNPYNLLSGLPPSHQWYTVLDLKDAFFCLRLHPTSQPLFAFEWRDPEMGISGQLTWTRLPQGFKNSPTLFDEALHRDLADFRIQHPDLILLQYVDDLLLAATSEQDCQRGTRALLQTLGNLGYRASAKKAQICQKQVKYLGYLLKEGQRWLTEARKETVMGQPTPKTPRQLREFLGTAGFCRLWIPGFAEMAAPLYPLTKTGTLFNWGPDQQKAYQEIKQALLTAPALGLPDLTKPFELFVDEKQGYAKGVLTQKLGPWRRPVAYLSKKLDPVAAGWPPCLRMVAAIAVLTKDAGKLTMGQPLVILAPHAVEALVKQPPDRWLSNARMTHYQAMLLDTDRVQFGPVVALNPATLLPLPEKEAPHDCLEILAETHGTRPDLTDQPIPDADYTWYTDGSSFLQEGQRRAGAAVTTETEVIWARALPAGTSAQRAELIALTQALKMAEGKKLNVYTDSRYAFATAHVHGEIYRRRGLLTSEGREIKNKNEILALLKALFLPKRLSIIHCPGHQKGNSAEARGNRMADQAAREAAMKAVLETSTLLAGKRTADGSEFEKRTADGSEFESPKKKAKVE

SEQ ID NO: 7689 - protein, 2103 aa, synthetic construct
MPAAKRVKLDGGDKKYSIGLDIGTNSVGWAVITDEYKVPSKKFKVLGNTDRHSIKKNLIGALLFDSGETAEATRLKRTARRRYTRRKNRICYLQEIFSNEMAKVDDSFFHRLEESFLVEEDKKHERHPIFGNIVDEVAYHEKYPTIYHLRKKLVDSTDKADLRLIYLALAHMIKFRGHFLIEGDLNPDNSDVDKLFIQLVQTYNQLFEENPINASGVDAKAILSARLSKSRRLENLIAQLPGEKKNGLFGNLIALSLGLTPNFKSNFDLAEDAKLQLSKDTYDDDLDNLLAQIGDQYADLFLAAKNLSDAILLSDILRVNTEITKAPLSASMIKRYDEHHQDLTLLKALVRQQLPEKYKEIFFDQSKNGYAGYIDGGASQEEFYKFIKPILEKMDGTEELLVKLNREDLLRKQRTFDNGSIPHQIHLGELHAILRRQEDFYPFLKDNREKIEKILTFRIPYYVGPLARGNSRFAWMTRKSEETITPWNFEEVVDKGASAQSFIERMTNFDKNLPNEKVLPKHSLLYEYFTVYNELTKVKYVTEGMRKPAFLSGEQKKAIVDLLFKTNRKVTVKQLKEDYFKKIECFDSVEISGVEDRFNASLGTYHDLLKIIKDKDFLDNEENEDILEDIVLTLTLFEDREMIEERLKTYAHLFDDKVMKQLKRRRYTGWGRLSRKLINGIRDKQSGKTILDFLKSDGFANRNFMQLIHDDSLTFKEDIQKAQVSGQGDSLHEHIANLAGSPAIKKGILQTVKVVDELVKVMGRHKPENIVIEMARENQTTQKGQKNSRERMKRIEEGIKELGSQILKEHPVENTQLQNEKLYLYYLQNGRDMYVDQELDINRLSDYDVDHIVPQSFLKDDSIDNKVLTRSDKARGKSDNVPSEEVVKKMKNYWRQLLNAKLITQRKFDNLTKAERGGLSELDKAGFIKRQLVETRQITKHVAQILDSRMNTKYDENDKLIREVKVITLKSKLVSDFRKDFQFYKVREINNYHHAHDAYLNAVVGTALIKKYPKLESEFVYGDYKVYDVRKMIAKSEQEIGKATAKYFFYSNIMNFFKTEITLANGEIRKRPLIETNGETGEIVWDKGRDFATVRKVLSMPQVNIVKKTEVQTGGFSKESILPKRNSDKLIARKKDWDPKKYGGFDSPTVAYSVLVVAKVEKGKSKKLKSVKELLGITIMERSSFEKNPIDFLEAKGYKEVKKDLIIKLPKYSLFELENGRKRMLASAGELQKGNELALPSKYVNFLYLASHYEKLKGSPEDNEQKQLFVEQHKHYLDEIIEQISEFSKRVILADANLDKVLSAYNKHRDKPIREQAENIIHLFTLTNLGAPAAFKYFDTTIDRKRYTSTKEVLDATLIHQSITGLYETRIDLSQLGGDGGSGSETPGTSESATPESGGTAPLEEEYRLFLEAPIQNVTLLEQWKREIPKVWAEINPPGLASTQAPIHVQLLSTALPVRVRQYPITLEAKRSLRETIRKFRAAGILRPVHSPWNTPLLPVRKSGTSEYRMVQDLREVNKRVETIHPTVPNPYTLLSLLPPDRIWYSVLDLKDAFFCIPLAPESQLIFAFEWADAEEGESGQLTWTRLPQGFKNSPTLFNEALNRDLQGFRLDHPSVSLLQYVDDLLIAADTQAACLSATRDLLMTLAELGYRVSGKKAQLCQEEVTYLGFKIHKGSRSLSNSRTQAILQIPVPKTKRQVREFLGTIGYCRLWIPGFAELAQPLYAATRPGNDPLVWGEKEEEAFQSLKLALTQPPALALPSLDKPFQLFVEETSGAAKGVLTQALGPWKRPVAYLSKRLDPVAAGWPRCLRAIAAAALLTREASKLTFGQDIEITSSHNLESLLRSPPDKWLTNARITQYQVLLLDPPRVRFKQTAALNPATLLPETDDTLPIHHCLDTLDSLTSTRPDLTDQPLAQAEATLFTDGSSYIRDGKRYAGAAVVTLDSVIWAEPLPIGTSAQKAELIALTKALEWSKDKSVNIYTDSRYAFATLHVHGMIYRERGWLTAGGKAIKNAPEILALLTAVWLPKRVAVMHCKGHQKDDAPTSTGNRRADEVAREVAIRPLSTQATISAGKRTADGSEFEKRTADGSEFESPKKKAKVE

SEQ ID NO: 7690 - protein, 2178 aa, synthetic construct
MPAAKRVKLDGGDKKYSIGLDIGTNSVGWAVITDEYKVPSKKFKVLGNTDRHSIKKNLIGALLFDSGETAEATRLKRTARRRYTRRKNRICYLQEIFSNEMAKVDDSFFHRLEESFLVEEDKKHERHPIFGNIVDEVAYHEKYPTIYHLRKKLVDSTDKADLRLIYLALAHMIKFRGHFLIEGDLNPDNSDVDKLFIQLVQTYNQLFEENPINASGVDAKAILSARLSKSRRLENLIAQLPGEKKNGLFGNLIALSLGLTPNFKSNFDLAEDAKLQLSKDTYDDDLDNLLAQIGDQYADLFLAAKNLSDAILLSDILRVNTEITKAPLSASMIKRYDEHHQDLTLLKALVRQQLPEKYKEIFFDQSKNGYAGYIDGGASQEEFYKFIKPILEKMDGTEELLVKLNREDLLRKQRTFDNGSIPHQIHLGELHAILRRQEDFYPFLKDNREKIEKILTFRIPYYVGPLARGNSRFAWMTRKSEETITPWNFEEVVDKGASAQSFIERMTNFDKNLPNEKVLPKHSLLYEYFTVYNELTKVKYVTEGMRKPAFLSGEQKKAIVDLLFKTNRKVTVKQLKEDYFKKIECFDSVEISGVEDRFNASLGTYHDLLKIIKDKDFLDNEENEDILEDIVLTLTLFEDREMIEERLKTYAHLFDDKVMKQLKRRRYTGWGRLSRKLINGIRDKQSGKTILDFLKSDGFANRNFMQLIHDDSLTFKEDIQKAQVSGQGDSLHEHIANLAGSPAIKKGILQTVKVVDELVKVMGRHKPENIVIEMARENQTTQKGQKNSRERMKRIEEGIKELGSQILKEHPVENTQLQNEKLYLYYLQNGRDMYVDQELDINRLSDYDVDHIVPQSFLKDDSIDNKVLTRSDKARGKSDNVPSEEVVKKMKNYWRQLLNAKLITQRKFDNLTKAERGGLSELDKAGFIKRQLVETRQITKHVAQILDSRMNTKYDENDKLIREVKVITLKSKLVSDFRKDFQFYKVREINNYHHAHDAYLNAVVGTALIKKYPKLESEFVYGDYKVYDVRKMIAKSEQEIGKATAKYFFYSNIMNFFKTEITLANGEIRKRPLIETNGETGEIVWDKGRDFATVRKVLSMPQVNIVKKTEVQTGGFSKESILPKRNSDKLIARKKDWDPKKYGGFDSPTVAYSVLVVAKVEKGKSKKLKSVKELLGITIMERSSFEKNPIDFLEAKGYKEVKKDLIIKLPKYSLFELENGRKRMLASAGELQKGNELALPSKYVNFLYLASHYEKLKGSPEDNEQKQLFVEQHKHYLDEIIEQISEFSKRVILADANLDKVLSAYNKHRDKPIREQAENIIHLFTLTNLGAPAAFKYFDTTIDRKRYTSTKEVLDATLIHQSITGLYETRIDLSQLGGDGGSGSETPGTSESATPESGGMDLLKPLTVERKGVKIKGYWNSQADITCVPKDLLQGEEPVRQQNVTTIHGTQEGDVYYVNLKIDGRRINTEVIGTTLDYAIITPGDVPWILKKPLELTIKLDLEEQQGTLLNNSILSKKGKEELKQLFEKYSALWQSWENQVGHRRIRPHKIATGTVKPTPQKQYHINPKAKPDIQIVINDLLKQGVLIQKESTMNTPVYPVPKPNGRWRMVLDYRAVNKVTPLIAVQNQHSYGILGSLFKGRYKTTIDLSNGFWAHPIVPEDYWITAFTWQGKQYCWTVLPQGFLNSPGLFTGDVVDLLQGIPNVEVYVDDVYISHDSEKEHLEYLDILFNRLKEAGYIISLKKSNIANSIVDFLGFQITNEGRGLTDTFKEKLENITAPTTLKQLQSILGLLNFARNFIPDFTELIAPLYALIPKSTKNYVPWQIEHSTTLETLITKLNGAEYLQGRKGDKTLIMKVNASYTTGYIRYYNEGEKKPISYVSIVFSKTELKFTELEKLLTTVHKGLLKALDLSMGQNIHVYSPIVSMQNIQKTPQTAKKALASRWLSWLSYLEDPRIRFFYDPQMPALKDLPAVDTGKDNKKHPSNFQHIFYTDGSAITSPTKEGHLNAGMGIVYFINKDGNLQKQQEWSISLGNHTAQFAEIAAFEFALKKCLPLGGNILVVTDSNYVAKAYNEELDVWASNGFVNNRKKPLKHISKWKSVADLKRLRPDVVVTHEPGHQKLDSSPHAYGNNLADQLATQASFKVHAGKRTADGSEFEKRTADGSEFESPKKKAKVE

SEQ ID NO: 7691 - protein, 2100 aa, synthetic construct
MPAAKRVKLDGGDKKYSIGLDIGTNSVGWAVITDEYKVPSKKFKVLGNTDRHSIKKNLIGALLFDSGETAEATRLKRTARRRYTRRKNRICYLQEIFSNEMAKVDDSFFHRLEESFLVEEDKKHERHPIFGNIVDEVAYHEKYPTIYHLRKKLVDSTDKADLRLIYLALAHMIKFRGHFLIEGDLNPDNSDVDKLFIQLVQTYNQLFEENPINASGVDAKAILSARLSKSRRLENLIAQLPGEKKNGLFGNLIALSLGLTPNFKSNFDLAEDAKLQLSKDTYDDDLDNLLAQIGDQYADLFLAAKNLSDAILLSDILRVNTEITKAPLSASMIKRYDEHHQDLTLLKALVRQQLPEKYKEIFFDQSKNGYAGYIDGGASQEEFYKFIKPILEKMDGTEELLVKLNREDLLRKQRTFDNGSIPHQIHLGELHAILRRQEDFYPFLKDNREKIEKILTFRIPYYVGPLARGNSRFAWMTRKSEETITPWNFEEVVDKGASAQSFIERMTNFDKNLPNEKVLPKHSLLYEYFTVYNELTKVKYVTEGMRKPAFLSGEQKKAIVDLLFKTNRKVTVKQLKEDYFKKIECFDSVEISGVEDRFNASLGTYHDLLKIIKDKDFLDNEENEDILEDIVLTLTLFEDREMIEERLKTYAHLFDDKVMKQLKRRRYTGWGRLSRKLINGIRDKQSGKTILDFLKSDGFANRNFMQLIHDDSLTFKEDIQKAQVSGQGDSLHEHIANLAGSPAIKKGILQTVKVVDELVKVMGRHKPENIVIEMARENQTTQKGQKNSRERMKRIEEGIKELGSQILKEHPVENTQLQNEKLYLYYLQNGRDMYVDQELDINRLSDYDVDHIVPQSFLKDDSIDNKVLTRSDKARGKSDNVPSEEVVKKMKNYWRQLLNAKLITQRKFDNLTKAERGGLSELDKAGFIKRQLVETRQITKHVAQILDSRMNTKYDENDKLIREVKVITLKSKLVSDFRKDFQFYKVREINNYHHAHDAYLNAVVGTALIKKYPKLESEFVYGDYKVYDVRKMIAKSEQEIGKATAKYFFYSNIMNFFKTEITLANGEIRKRPLIETNGETGEIVWDKGRDFATVRKVLSMPQVNIVKKTEVQTGGFSKESILPKRNSDKLIARKKDWDPKKYGGFDSPTVAYSVLVVAKVEKGKSKKLKSVKELLGITIMERSSFEKNPIDFLEAKGYKEVKKDLIIKLPKYSLFELENGRKRMLASAGELQKGNELALPSKYVNFLYLASHYEKLKGSPEDNEQKQLFVEQHKHYLDEIIEQISEFSKRVILADANLDKVLSAYNKHRDKPIREQAENIIHLFTLTNLGAPAAFKYFDTTIDRKRYTSTKEVLDATLIHQSITGLYETRIDLSQLGGDGGSGSETPGTSESATPESGGTLQLEEEYRLFEPESTQKQEMDIWLKNFPQAWAETGGMGTAHCQAPVLIQLKATATPISIRQYPMPHEAYQGIKPHIRRMLDQGILKPCQSPWNTPLLPVKKPGTEDYRPVQDLREVNKRVEDIHPTVPNPYNLLSTLPPSHPWYTVLDLKDAFFCLRLHSESQLLFAFEWRDPEIGLSGQLTWTRLPQGFKNSPTLFNEALHSDLADFRVRYPALVLLQYVDDLLLAAATRTECLEGTKALLETLGNKGYRASAKKAQICLQEVTYLGYSLKDGQRWLTKARKEAILSIPVPKNSRQVREFLGTAGYCRLWIPGFAELAAPLYPLTRPGTLFQWGTEQQLAFEDIKKALLSSPALGLPDITKPFELFIDENSGFAKGVLVQKLGPWKRPVAYLSKKLDTVASGWPPCLRMVAAIAILVKDAGKLTLGQPLTILTSHPVEALVRQPPNKWLSNARMTHYQAMLLDAERVHFGPTVSLNPATLLPLPSGGNHHDCLQILAETHGTRPDLTDQPLPDADLTWYTDGSSFIRNGEREAGAAVTTESEVIWAAPLPPGTSAQRAELIALTQALKMAEGKKLTVYTDSRYAFATTHVHGEIYRRRGWLTSEGKEIKNKNEILALLEALFLPKRLSIIHCPGHQKGDSPQAKGNRLADDTAKKAATETHSSLTVLPAGKRTADGSEFEKRTADGSEFESPKKKAKVE

SEQ ID NO: 7692 - protein, 2011 aa, synthetic construct
MPAAKRVKLDGGDKKYSIGLDIGTNSVGWAVITDEYKVPSKKFKVLGNTDRHSIKKNLIGALLFDSGETAEATRLKRTARRRYTRRKNRICYLQEIFSNEMAKVDDSFFHRLEESFLVEEDKKHERHPIFGNIVDEVAYHEKYPTIYHLRKKLVDSTDKADLRLIYLALAHMIKFRGHFLIEGDLNPDNSDVDKLFIQLVQTYNQLFEENPINASGVDAKAILSARLSKSRRLENLIAQLPGEKKNGLFGNLIALSLGLTPNFKSNFDLAEDAKLQLSKDTYDDDLDNLLAQIGDQYADLFLAAKNLSDAILLSDILRVNTEITKAPLSASMIKRYDEHHQDLTLLKALVRQQLPEKYKEIFFDQSKNGYAGYIDGGASQEEFYKFIKPILEKMDGTEELLVKLNREDLLRKQRTFDNGSIPHQIHLGELHAILRRQEDFYPFLKDNREKIEKILTFRIPYYVGPLARGNSRFAWMTRKSEETITPWNFEEVVDKGASAQSFIERMTNFDKNLPNEKVLPKHSLLYEYFTVYNELTKVKYVTEGMRKPAFLSGEQKKAIVDLLFKTNRKVTVKQLKEDYFKKIECFDSVEISGVEDRFNASLGTYHDLLKIIKDKDFLDNEENEDILEDIVLTLTLFEDREMIEERLKTYAHLFDDKVMKQLKRRRYTGWGRLSRKLINGIRDKQSGKTILDFLKSDGFANRNFMQLIHDDSLTFKEDIQKAQVSGQGDSLHEHIANLAGSPAIKKGILQTVKVVDELVKVMGRHKPENIVIEMARENQTTQKGQKNSRERMKRIEEGIKELGSQILKEHPVENTQLQNEKLYLYYLQNGRDMYVDQELDINRLSDYDVDHIVPQSFLKDDSIDNKVLTRSDKARGKSDNVPSEEVVKKMKNYWRQLLNAKLITQRKFDNLTKAERGGLSELDKAGFIKRQLVETRQITKHVAQILDSRMNTKYDENDKLIREVKVITLKSKLVSDFRKDFQFYKVREINNYHHAHDAYLNAVVGTALIKKYPKLESEFVYGDYKVYDVRKMIAKSEQEIGKATAKYFFYSNIMNFFKTEITLANGEIRKRPLIETNGETGEIVWDKGRDFATVRKVLSMPQVNIVKKTEVQTGGFSKESILPKRNSDKLIARKKDWDPKKYGGFDSPTVAYSVLVVAKVEKGKSKKLKSVKELLGITIMERSSFEKNPIDFLEAKGYKEVKKDLIIKLPKYSLFELENGRKRMLASAGELQKGNELALPSKYVNFLYLASHYEKLKGSPEDNEQKQLFVEQHKHYLDEIIEQISEFSKRVILADANLDKVLSAYNKHRDKPIREQAENIIHLFTLTNLGAPAAFKYFDTTIDRKRYTSTKEVLDATLIHQSITGLYETRIDLSQLGGDGGSGSETPGTSESATPESGGPLGTSDSPVTHADPIDWKSEEPVWVDQWPLTQEKLSAAQQLVQEQLRLGHIEPSTSAWNSPIFVIKKKSGKWRLLQDLRKVNETMMHMGALQPGLPTPSPIPDKSYIIVIDLKDCFYTIPLAPQDCKRFAFSLPSVNFKEPMQRYQWRVLPQGMTNSPTLCQKFVATAIAPVRQRFPQLYLVHYMDDILLAHTDEHLLYQAFSILKQHLSLNGLVIADEKIQTHFPYNYLGFSLYPRVYNTQLVKLQTDHLKTLNDFQKLLGDINWIRPYLKLPTYTLQPLFDILKGDSDPASPRTLSLEGRTALQSIEEAIRQQQITYCDYQRSWGLYILPTPRAPTGVLYQDKPLRWIYLSATPTKHLLPYYELVAKIIAKGRHEAIQYFGMEPPFICVPYALEQQDWLFQFSDNWSIAFANYPGQITHHYPSDKLLQFASSHAFIFPKIVRRQPIPEATLIFTDGSSNGTAALIINHQTYYAQTSFSSAQVVELFAVHQALLTVPTSFNLFTDSSYVVGALQMIETVPIIGTTSPEVLNLFTLIQQVLHCRQHPCFFGHIRAHSTLPGALVQGNHTADVLTKQVFFQSAGKRTADGSEFEKRTADGSEFESPKKKAKVE

SEQ ID NO: 7693 - protein, 2223 aa, synthetic construct
MPAAKRVKLDGGDKKYSIGLDIGTNSVGWAVITDEYKVPSKKFKVLGNTDRHSIKKNLIGALLFDSGETAEATRLKRTARRRYTRRKNRICYLQEIFSNEMAKVDDSFFHRLEESFLVEEDKKHERHPIFGNIVDEVAYHEKYPTIYHLRKKLVDSTDKADLRLIYLALAHMIKFRGHFLIEGDLNPDNSDVDKLFIQLVQTYNQLFEENPINASGVDAKAILSARLSKSRRLENLIAQLPGEKKNGLFGNLIALSLGLTPNFKSNFDLAEDAKLQLSKDTYDDDLDNLLAQIGDQYADLFLAAKNLSDAILLSDILRVNTEITKAPLSASMIKRYDEHHQDLTLLKALVRQQLPEKYKEIFFDQSKNGYAGYIDGGASQEEFYKFIKPILEKMDGTEELLVKLNREDLLRKQRTFDNGSIPHQIHLGELHAILRRQEDFYPFLKDNREKIEKILTFRIPYYVGPLARGNSRFAWMTRKSEETITPWNFEEVVDKGASAQSFIERMTNFDKNLPNEKVLPKHSLLYEYFTVYNELTKVKYVTEGMRKPAFLSGEQKKAIVDLLFKTNRKVTVKQLKEDYFKKIECFDSVEISGVEDRFNASLGTYHDLLKIIKDKDFLDNEENEDILEDIVLTLTLFEDREMIEERLKTYAHLFDDKVMKQLKRRRYTGWGRLSRKLINGIRDKQSGKTILDFLKSDGFANRNFMQLIHDDSLTFKEDIQKAQVSGQGDSLHEHIANLAGSPAIKKGILQTVKVVDELVKVMGRHKPENIVIEMARENQTTQKGQKNSRERMKRIEEGIKELGSQILKEHPVENTQLQNEKLYLYYLQNGRDMYVDQELDINRLSDYDVDHIVPQSFLKDDSIDNKVLTRSDKARGKSDNVPSEEVVKKMKNYWRQLLNAKLITQRKFDNLTKAERGGLSELDKAGFIKRQLVETRQITKHVAQILDSRMNTKYDENDKLIREVKVITLKSKLVSDFRKDFQFYKVREINNYHHAHDAYLNAVVGTALIKKYPKLESEFVYGDYKVYDVRKMIAKSEQEIGKATAKYFFYSNIMNFFKTEITLANGEIRKRPLIETNGETGEIVWDKGRDFATVRKVLSMPQVNIVKKTEVQTGGFSKESILPKRNSDKLIARKKDWDPKKYGGFDSPTVAYSVLVVAKVEKGKSKKLKSVKELLGITIMERSSFEKNPIDFLEAKGYKEVKKDLIIKLPKYSLFELENGRKRMLASAGELQKGNELALPSKYVNFLYLASHYEKLKGSPEDNEQKQLFVEQHKHYLDEIIEQISEFSKRVILADANLDKVLSAYNKHRDKPIREQAENIIHLFTLTNLGAPAAFKYFDTTIDRKRYTSTKEVLDATLIHQSITGLYETRIDLSQLGGDGGSGSETPGTSESATPESGGTLGDQGSRGSDPLPEPRVTLTVEGIPTEFLVNTGAEHSVLTKPMGKMGSKRTVVAGATGSKVYPWTTKRLLKIGQKQVTHSFLVIPECPAPLLGRDLLTKLKAQIQFSTEGPQVTWEDRPAMCLVLNLEEEYRLHEKPVPPSIDPSWLQLFPMVWAEKAGMGLANQVPPVVVELKSDASPVAVRQYPMSKEAREGIRPHIQRFLDLGILVPCQSPWNTPLLPVKKPGTNDYRPVQDLREVNKRVQDIHPTVPNPYNLLSSLPPSHTWYSVLDLKDAFFCLKLHPNSQPLFAFEWRDPEKGNTGQLTWTRLPQGFKNSPTLFDEALHRDLASFRALNPQVVMLQYVDDLLVAAPTYRDCKEGTRRLLQELSKLGYRVSAKKAQLCREEVTYLGYLLKGGKRWLTPARKATVMKIPTPTTPRQVREFLGTAGFCRLWIPGFASLAAPLYPLTREKVPFTWTEAHQEAFGRIKEALLSAPALALPDLTKPFALYVDEKEGVARGVLTQTLGPWRRPVAYLSKKLDPVASGWPTCLKAIAAVALLLKDADKLTLGQNVLVIAPHNLESIVRQPPDRWMTNARMTHYQSLLLNERVSFAPPAILNPATLLPVESDDTPIHICSEILAEETGTRPDLRDQPLPGVPAWYTDGSSFIMDGRRQAGAAIVDNKRTVWASNLPEGTSAQKAELIALTQALRLAEGKSINIYTDSRYAFATAHVHGAIYKQRGLLTSAGKDIKNKEEILALLEAIHLPKRVAIIHCPGHQRGTDPVATGNRKADEAAKQAAQSTRILTETTKNAGKRTADGSEFEKRTADGSEFESPKKKAKVE

SEQ ID NO: 7694 - protein, 2132 aa, synthetic construct
MPAAKRVKLDGGDKKYSIGLDIGTNSVGWAVITDEYKVPSKKFKVLGNTDRHSIKKNLIGALLFDSGETAEATRLKRTARRRYTRRKNRICYLQEIFSNEMAKVDDSFFHRLEESFLVEEDKKHERHPIFGNIVDEVAYHEKYPTIYHLRKKLVDSTDKADLRLIYLALAHMIKFRGHFLIEGDLNPDNSDVDKLFIQLVQTYNQLFEENPINASGVDAKAILSARLSKSRRLENLIAQLPGEKKNGLFGNLIALSLGLTPNFKSNFDLAEDAKLQLSKDTYDDDLDNLLAQIGDQYADLFLAAKNLSDAILLSDILRVNTEITKAPLSASMIKRYDEHHQDLTLLKALVRQQLPEKYKEIFFDQSKNGYAGYIDGGASQEEFYKFIKPILEKMDGTEELLVKLNREDLLRKQRTFDNGSIPHQIHLGELHAILRRQEDFYPFLKDNREKIEKILTFRIPYYVGPLARGNSRFAWMTRKSEETITPWNFEEVVDKGASAQSFIERMTNFDKNLPNEKVLPKHSLLYEYFTVYNELTKVKYVTEGMRKPAFLSGEQKKAIVDLLFKTNRKVTVKQLKEDYFKKIECFDSVEISGVEDRFNASLGTYHDLLKIIKDKDFLDNEENEDILEDIVLTLTLFEDREMIEERLKTYAHLFDDKVMKQLKRRRYTGWGRLSRKLINGIRDKQSGKTILDFLKSDGFANRNFMQLIHDDSLTFKEDIQKAQVSGQGDSLHEHIANLAGSPAIKKGILQTVKVVDELVKVMGRHKPENIVIEMARENQTTQKGQKNSRERMKRIEEGIKELGSQILKEHPVENTQLQNEKLYLYYLQNGRDMYVDQELDINRLSDYDVDHIVPQSFLKDDSIDNKVLTRSDKARGKSDNVPSEEVVKKMKNYWRQLLNAKLITQRKFDNLTKAERGGLSELDKAGFIKRQLVETRQITKHVAQILDSRMNTKYDENDKLIREVKVITLKSKLVSDFRKDFQFYKVREINNYHHAHDAYLNAVVGTALIKKYPKLESEFVYGDYKVYDVRKMIAKSEQEIGKATAKYFFYSNIMNFFKTEITLANGEIRKRPLIETNGETGEIVWDKGRDFATVRKVLSMPQVNIVKKTEVQTGGFSKESILPKRNSDKLIARKKDWDPKKYGGFDSPTVAYSVLVVAKVEKGKSKKLKSVKELLGITIMERSSFEKNPIDFLEAKGYKEVKKDLIIKLPKYSLFELENGRKRMLASAGELQKGNELALPSKYVNFLYLASHYEKLKGSPEDNEQKQLFVEQHKHYLDEIIEQISEFSKRVILADANLDKVLSAYNKHRDKPIREQAENIIHLFTLTNLGAPAAFKYFDTTIDRKRYTSTKEVLDATLIHQSITGLYETRIDLSQLGGDGGSGSETPGTSESATPESGGLLGRDLLTKLKAQIQFSTEGPQVTWEDRPAMCLVLNLEEEYRLHEKPVPPSIDPSWLQLFPMVWAEKAGMGLANQVPPVVVELKSDASPVAVRQYPMSKEAREGIRPHIQRFLDLGILVPCQSPWNTPLLPVKKPGTNDYRPVQDLREVNKRVQDIHPTVPNPYNLLSSLPPSHTWYSVLDLKDAFFCLKLHPNSQPLFAFEWRDPEKGNTGQLTWTRLPQGFKNSPTLFNEALHRDLASFRALNPQVVMLQYVDDLLVAAPTYRDCKEGTRRLLQELSKLGYRVSAKKAQLCREEVTYLGYLLKGGKRWLTPARKATVMKIPTPTTPRQVREFLGKAGFCRLFIPGFASLAAPLYPLTRPKVPFTWTEAHQEAFGRIKEALLSAPALALPDLTKPFALYVDEKEGVARGVLTQTLGPWRRPVAYLSKKLDPVASGWPTCLKAIAAVALLLKDADKLTLGQNVLVIAPHNLESIVRQPPDRWMTNARMTHYQSLLLNERVSFAPPAILNPATLLPVESDDTPIHICSEILAEETGTRPDLRDQPLPGVPAWYTDGSSFIMDGRRQAGAAIVDNKRTVWASNLPEGTSAQKAELIALTQALRLAEGKSINIYTDSRYAFATAHVHGAIYKQRGWLTSAGKDIKNKEEILALLEAIHLPKRVAIIHCPGHQRGTDPVATGNRKADEAAKQAAQSTRILTETTKNAGKRTADGSEFEKRTADGSEFESPKKKAKVE

SEQ ID NO: 7695 - protein, 2223 aa, synthetic construct
MPAAKRVKLDGGDKKYSIGLDIGTNSVGWAVITDEYKVPSKKFKVLGNTDRHSIKKNLIGALLFDSGETAEATRLKRTARRRYTRRKNRICYLQEIFSNEMAKVDDSFFHRLEESFLVEEDKKHERHPIFGNIVDEVAYHEKYPTIYHLRKKLVDSTDKADLRLIYLALAHMIKFRGHFLIEGDLNPDNSDVDKLFIQLVQTYNQLFEENPINASGVDAKAILSARLSKSRRLENLIAQLPGEKKNGLFGNLIALSLGLTPNFKSNFDLAEDAKLQLSKDTYDDDLDNLLAQIGDQYADLFLAAKNLSDAILLSDILRVNTEITKAPLSASMIKRYDEHHQDLTLLKALVRQQLPEKYKEIFFDQSKNGYAGYIDGGASQEEFYKFIKPILEKMDGTEELLVKLNREDLLRKQRTFDNGSIPHQIHLGELHAILRRQEDFYPFLKDNREKIEKILTFRIPYYVGPLARGNSRFAWMTRKSEETITPWNFEEVVDKGASAQSFIERMTNFDKNLPNEKVLPKHSLLYEYFTVYNELTKVKYVTEGMRKPAFLSGEQKKAIVDLLFKTNRKVTVKQLKEDYFKKIECFDSVEISGVEDRFNASLGTYHDLLKIIKDKDFLDNEENEDILEDIVLTLTLFEDREMIEERLKTYAHLFDDKVMKQLKRRRYTGWGRLSRKLINGIRDKQSGKTILDFLKSDGFANRNFMQLIHDDSLTFKEDIQKAQVSGQGDSLHEHIANLAGSPAIKKGILQTVKVVDELVKVMGRHKPENIVIEMARENQTTQKGQKNSRERMKRIEEGIKELGSQILKEHPVENTQLQNEKLYLYYLQNGRDMYVDQELDINRLSDYDVDHIVPQSFLKDDSIDNKVLTRSDKARGKSDNVPSEEVVKKMKNYWRQLLNAKLITQRKFDNLTKAERGGLSELDKAGFIKRQLVETRQITKHVAQILDSRMNTKYDENDKLIREVKVITLKSKLVSDFRKDFQFYKVREINNYHHAHDAYLNAVVGTALIKKYPKLESEFVYGDYKVYDVRKMIAKSEQEIGKATAKYFFYSNIMNFFKTEITLANGEIRKRPLIETNGETGEIVWDKGRDFATVRKVLSMPQVNIVKKTEVQTGGFSKESILPKRNSDKLIARKKDWDPKKYGGFDSPTVAYSVLVVAKVEKGKSKKLKSVKELLGITIMERSSFEKNPIDFLEAKGYKEVKKDLIIKLPKYSLFELENGRKRMLASAGELQKGNELALPSKYVNFLYLASHYEKLKGSPEDNEQKQLFVEQHKHYLDEIIEQISEFSKRVILADANLDKVLSAYNKHRDKPIREQAENIIHLFTLTNLGAPAAFKYFDTTIDRKRYTSTKEVLDATLIHQSITGLYETRIDLSQLGGDGGSGSETPGTSESATPESGGTLGDQGSRGSDPLPEPRVTLTVEGIPTEFLVNTGAEHSVLTKPMGKMGSKRTVVAGATGSKVYPWTTKRLLKIGQKQVTHSFLVIPECPAPLLGRDLLTKLKAQIQFSTEGPQVTWEDRPAMCLVLNLEEEYRLHEKPVPPSIDPSWLQLFPMVWAEKAGMGLANQVPPVVVELKSDASPVAVRQYPMSKEAREGIRPHIQRFLDLGILVPCQSPWNTPLLPVKKPGTNDYRPVQDLREVNKRVQDIHPTVPNPYNLLSSLPPSHTWYSVLDLKDAFFCLKLHPNSQPLFAFEWRDPEKGNTGQLTWTRLPQGFKNSPTLFNEALHRDLASFRALNPQVVMLQYVDDLLVAAPTYRDCKEGTRRLLQELSKLGYRVSAKKAQLCREEVTYLGYLLKGGKRWLTPARKATVMKIPTPTTPRQVREFLGTAGFCRLWIPGFASLAAPLYPLTRPKVPFTWTEAHQEAFGRIKEALLSAPALALPDLTKPFALYVDEKEGVARGVLTQTLGPWRRPVAYLSKKLDPVASGWPTCLKAIAAVALLLKDADKLTLGQNVLVIAPHNLESIVRQPPDRWMTNARMTHYQSLLLNERVSFAPPAILNPATLLPVESDDTPIHICSEILAEETGTRPDLRDQPLPGVPAWYTDGSSFIMDGRRQAGAAIVDNKRTVWASNLPEGTSAQKAELIALTQALRLAEGKSINIYTDSRYAFATAHVHGAIYKQRGWLTSAGKDIKNKEEILALLEAIHLPKRVAIIHCPGHQRGTDPVATGNRKADEAAKQAAQSTRILTETTKNAGKRTADGSEFEKRTADGSEFESPKKKAKVE

SEQ ID NO: 7696 - protein, 2101 aa, synthetic construct
MPAAKRVKLDGGDKKYSIGLDIGTNSVGWAVITDEYKVPSKKFKVLGNTDRHSIKKNLIGALLFDSGETAEATRLKRTARRRYTRRKNRICYLQEIFSNEMAKVDDSFFHRLEESFLVEEDKKHERHPIFGNIVDEVAYHEKYPTIYHLRKKLVDSTDKADLRLIYLALAHMIKFRGHFLIEGDLNPDNSDVDKLFIQLVQTYNQLFEENPINASGVDAKAILSARLSKSRRLENLIAQLPGEKKNGLFGNLIALSLGLTPNFKSNFDLAEDAKLQLSKDTYDDDLDNLLAQIGDQYADLFLAAKNLSDAILLSDILRVNTEITKAPLSASMIKRYDEHHQDLTLLKALVRQQLPEKYKEIFFDQSKNGYAGYIDGGASQEEFYKFIKPILEKMDGTEELLVKLNREDLLRKQRTFDNGSIPHQIHLGELHAILRRQEDFYPFLKDNREKIEKILTFRIPYYVGPLARGNSRFAWMTRKSEETITPWNFEEVVDKGASAQSFIERMTNFDKNLPNEKVLPKHSLLYEYFTVYNELTKVKYVTEGMRKPAFLSGEQKKAIVDLLFKTNRKVTVKQLKEDYFKKIECFDSVEISGVEDRFNASLGTYHDLLKIIKDKDFLDNEENEDILEDIVLTLTLFEDREMIEERLKTYAHLFDDKVMKQLKRRRYTGWGRLSRKLINGIRDKQSGKTILDFLKSDGFANRNFMQLIHDDSLTFKEDIQKAQVSGQGDSLHEHIANLAGSPAIKKGILQTVKVVDELVKVMGRHKPENIVIEMARENQTTQKGQKNSRERMKRIEEGIKELGSQILKEHPVENTQLQNEKLYLYYLQNGRDMYVDQELDINRLSDYDVDHIVPQSFLKDDSIDNKVLTRSDKARGKSDNVPSEEVVKKMKNYWRQLLNAKLITQRKFDNLTKAERGGLSELDKAGFIKRQLVETRQITKHVAQILDSRMNTKYDENDKLIREVKVITLKSKLVSDFRKDFQFYKVREINNYHHAHDAYLNAVVGTALIKKYPKLESEFVYGDYKVYDVRKMIAKSEQEIGKATAKYFFYSNIMNFFKTEITLANGEIRKRPLIETNGETGEIVWDKGRDFATVRKVLSMPQVNIVKKTEVQTGGFSKESILPKRNSDKLIARKKDWDPKKYGGFDSPTVAYSVLVVAKVEKGKSKKLKSVKELLGITIMERSSFEKNPIDFLEAKGYKEVKKDLIIKLPKYSLFELENGRKRMLASAGELQKGNELALPSKYVNFLYLASHYEKLKGSPEDNEQKQLFVEQHKHYLDEIIEQISEFSKRVILADANLDKVLSAYNKHRDKPIREQAENIIHLFTLTNLGAPAAFKYFDTTIDRKRYTSTKEVLDATLIHQSITGLYETRIDLSQLGGDGGSGSETPGTSESATPESGGTLNLEDEYRLYETSAEPEVSPGSTWLSDFPQAWAETGGMGLAVRQAPLIIPLKATSTPVSIKQYPMSQEAKLGIKPHIQRLLDQGILVPCQSPWNTPLLPVKKPGTNDYRPVQDLREVNKRVEDIHPTVPNPYNLLSGLPPSHRWYTVLDLKDAFFCLRLHPTSQPLFAFEWRDPGMGISGQLTWTRLPQGFKNSPTLFNEALHRDLADFRIQHPDLILLQYVDDILLAATSELDCQQGTRALLLTLGNLGYRASAKKAQLCQKQVKYLGYLLKEGQRWLTEARKETVMGQPTPKTPRQLREFLGTAGFCRLWIPGFAEMAAPLYPLTKPGTLFNWGPDQQKAYQEIKQALLTAPALGLPDLTKPFELFVDEKQGYAKGVLTQKLGPWRRPVAYLSKKLDPVAAGWPPCLRMVAAIAVLRKDAGKLTMGQPLVILAPHAVEALVKQPPDRWLSNARMTHYQAMLLDTDRVQFGPVVALNPATLLPLPEEGAPHDCLEILAETHGTRPDLTDQPIPDADHTWYTDGSSFLQEGQRKAGAAVTTETEVIWARALPAGTSAQRAELIALTQALKMAEGKRLNVYTDSRYAFATAHIHGEIYRRRGWLTSEGREIKNKSEILALLKALFLPKRLSIIHCLGHQKGDSAEARGNRLADQAAREAAIKTPPDTSTLLAGKRTADGSEFEKRTADGSEFESPKKKAKVE

SEQ ID NO: 7697 - protein, 2101 aa, synthetic construct
MPAAKRVKLDGGDKKYSIGLDIGTNSVGWAVITDEYKVPSKKFKVLGNTDRHSIKKNLIGALLFDSGETAEATRLKRTARRRYTRRKNRICYLQEIFSNEMAKVDDSFFHRLEESFLVEEDKKHERHPIFGNIVDEVAYHEKYPTIYHLRKKLVDSTDKADLRLIYLALAHMIKFRGHFLIEGDLNPDNSDVDKLFIQLVQTYNQLFEENPINASGVDAKAILSARLSKSRRLENLIAQLPGEKKNGLFGNLIALSLGLTPNFKSNFDLAEDAKLQLSKDTYDDDLDNLLAQIGDQYADLFLAAKNLSDAILLSDILRVNTEITKAPLSASMIKRYDEHHQDLTLLKALVRQQLPEKYKEIFFDQSKNGYAGYIDGGASQEEFYKFIKPILEKMDGTEELLVKLNREDLLRKQRTFDNGSIPHQIHLGELHAILRRQEDFYPFLKDNREKIEKILTFRIPYYVGPLARGNSRFAWMTRKSEETITPWNFEEVVDKGASAQSFIERMTNFDKNLPNEKVLPKHSLLYEYFTVYNELTKVKYVTEGMRKPAFLSGEQKKAIVDLLFKTNRKVTVKQLKEDYFKKIECFDSVEISGVEDRFNASLGTYHDLLKIIKDKDFLDNEENEDILEDIVLTLTLFEDREMIEERLKTYAHLFDDKVMKQLKRRRYTGWGRLSRKLINGIRDKQSGKTILDFLKSDGFANRNFMQLIHDDSLTFKEDIQKAQVSGQGDSLHEHIANLAGSPAIKKGILQTVKVVDELVKVMGRHKPENIVIEMARENQTTQKGQKNSRERMKRIEEGIKELGSQILKEHPVENTQLQNEKLYLYYLQNGRDMYVDQELDINRLSDYDVDHIVPQSFLKDDSIDNKVLTRSDKARGKSDNVPSEEVVKKMKNYWRQLLNAKLITQRKFDNLTKAERGGLSELDKAGFIKRQLVETRQITKHVAQILDSRMNTKYDENDKLIREVKVITLKSKLVSDFRKDFQFYKVREINNYHHAHDAYLNAVVGTALIKKYPKLESEFVYGDYKVYDVRKMIAKSEQEIGKATAKYFFYSNIMNFFKTEITLANGEIRKRPLIETNGETGEIVWDKGRDFATVRKVLSMPQVNIVKKTEVQTGGFSKESILPKRNSDKLIARKKDWDPKKYGGFDSPTVAYSVLVVAKVEKGKSKKLKSVKELLGITIMERSSFEKNPIDFLEAKGYKEVKKDLIIKLPKYSLFELENGRKRMLASAGELQKGNELALPSKYVNFLYLASHYEKLKGSPEDNEQKQLFVEQHKHYLDEIIEQISEFSKRVILADANLDKVLSAYNKHRDKPIREQAENIIHLFTLTNLGAPAAFKYFDTTIDRKRYTSTKEVLDATLIHQSITGLYETRIDLSQLGGDGGSGSETPGTSESATPESGGTLNLEDEYRLYETSAEPEVSPGSTWLSDFPQAWAETGGMGLAVRQAPLIIPLKATSTPVSIKQYPMSQEAKLGIKPHIQRLLDQGILVPCQSPWNTPLLPVKKPGTNDYRPVQDLREVNKRVEDIHPTVPNPYNLLSGLPPSHRWYTVLDLKDAFFCLRLHPTSQPLFAFEWRDPGMGISGQLTWTRLPQGFKNSPTLFNEALHRDLADFRIQHPDLILLQYVDDILLAATSELDCQQGTRALLLTLGNLGYRASAKKAQLCQKQVKYLGYLLKEGQRWLTEARKETVMGQPTPKTPRQLREFLGKAGFCRLFIPGFAEMAAPLYPLTKPGTLFNWGPDQQKAYQEIKQALLTAPALGLPDLTKPFELFVDEKQGYAKGVLTQKLGPWRRPVAYLSKKLDPVAAGWPPCLRMVAAIAVLRKDAGKLTMGQPLVILAPHAVEALVKQPPDRWLSNARMTHYQAMLLDTDRVQFGPVVALNPATLLPLPEEGAPHDCLEILAETHGTRPDLTDQPIPDADHTWYTDGSSFLQEGQRKAGAAVTTETEVIWARALPAGTSAQRAELIALTQALKMAEGKRLNVYTDSRYAFATAHIHGEIYRRRGWLTSEGREIKNKSEILALLKALFLPKRLSIIHCLGHQKGDSAEARGNRLADQAAREAAIKTPPDTSTLLAGKRTADGSEFEKRTADGSEFESPKKKAKVE

SEQ ID NO: 7698 - protein, 2101 aa, synthetic construct
MPAAKRVKLDGGDKKYSIGLDIGTNSVGWAVITDEYKVPSKKFKVLGNTDRHSIKKNLIGALLFDSGETAEATRLKRTARRRYTRRKNRICYLQEIFSNEMAKVDDSFFHRLEESFLVEEDKKHERHPIFGNIVDEVAYHEKYPTIYHLRKKLVDSTDKADLRLIYLALAHMIKFRGHFLIEGDLNPDNSDVDKLFIQLVQTYNQLFEENPINASGVDAKAILSARLSKSRRLENLIAQLPGEKKNGLFGNLIALSLGLTPNFKSNFDLAEDAKLQLSKDTYDDDLDNLLAQIGDQYADLFLAAKNLSDAILLSDILRVNTEITKAPLSASMIKRYDEHHQDLTLLKALVRQQLPEKYKEIFFDQSKNGYAGYIDGGASQEEFYKFIKPILEKMDGTEELLVKLNREDLLRKQRTFDNGSIPHQIHLGELHAILRRQEDFYPFLKDNREKIEKILTFRIPYYVGPLARGNSRFAWMTRKSEETITPWNFEEVVDKGASAQSFIERMTNFDKNLPNEKVLPKHSLLYEYFTVYNELTKVKYVTEGMRKPAFLSGEQKKAIVDLLFKTNRKVTVKQLKEDYFKKIECFDSVEISGVEDRFNASLGTYHDLLKIIKDKDFLDNEENEDILEDIVLTLTLFEDREMIEERLKTYAHLFDDKVMKQLKRRRYTGWGRLSRKLINGIRDKQSGKTILDFLKSDGFANRNFMQLIHDDSLTFKEDIQKAQVSGQGDSLHEHIANLAGSPAIKKGILQTVKVVDELVKVMGRHKPENIVIEMARENQTTQKGQKNSRERMKRIEEGIKELGSQILKEHPVENTQLQNEKLYLYYLQNGRDMYVDQELDINRLSDYDVDHIVPQSFLKDDSIDNKVLTRSDKARGKSDNVPSEEVVKKMKNYWRQLLNAKLITQRKFDNLTKAERGGLSELDKAGFIKRQLVETRQITKHVAQILDSRMNTKYDENDKLIREVKVITLKSKLVSDFRKDFQFYKVREINNYHHAHDAYLNAVVGTALIKKYPKLESEFVYGDYKVYDVRKMIAKSEQEIGKATAKYFFYSNIMNFFKTEITLANGEIRKRPLIETNGETGEIVWDKGRDFATVRKVLSMPQVNIVKKTEVQTGGFSKESILPKRNSDKLIARKKDWDPKKYGGFDSPTVAYSVLVVAKVEKGKSKKLKSVKELLGITIMERSSFEKNPIDFLEAKGYKEVKKDLIIKLPKYSLFELENGRKRMLASAGELQKGNELALPSKYVNFLYLASHYEKLKGSPEDNEQKQLFVEQHKHYLDEIIEQISEFSKRVILADANLDKVLSAYNKHRDKPIREQAENIIHLFTLTNLGAPAAFKYFDTTIDRKRYTSTKEVLDATLIHQSITGLYETRIDLSQLGGDGGSGSETPGTSESATPESGGTLGIEDEYRLHETSTEPDVSLGSTWLSDFPQAWAETGGMGLAVRQAPLIIPLKATSTPVSIQQYPMSHEARLGIKPHIQRLLDQGILVPCQSPWNTPLLPVKKPGTNDYRPVQDLREVNKRVEDIHPTVPNPYNLLSGLPPSHQWYTVLDLKDAFFCLRLHPTSQPLFAFEWRDPGMGISGQLTWTRLPQGFKNSPTLFNEALHRDLADFRIQHPDLILLQYVDDILLAATSELDCQQGTRALLQTLGDLGYRASAKKAQICQKQVKYLGYLLREGQRWLTEARKETVMGQPVPKTPRQLREFLGTAGFCRLWIPGFAEMAAPLYPLTKPGTLFSWGPDQQKAYQEIKQALLTAPALGLPDLTKPFELFVDEKQGYAKGVLTQKLGPWRRPVAYLSKKLDPVAAGWPPCLRMVAAIAVLTKDAGKLTMGQPLVILAPHAVEALVKQPPDRWLSNARMTHYQAMLLDTDRVQFGPVVALNPATLLPLPEEGAPHDCLEILAETHGTRPDLTDQPIPDADHTWYTDGSSFLQEGQRKAGAAVTTETEVIWAGALPAGTSAQRAELIALTQALKMAEGKRLNVYTDSRYAFATAHIHGEIYRRRGWLTSEGREIKNKSEILALLKALFLPKRLSIIHCLGHQKGDSAEARGNRLADQAAREAAIKTPPDTSTLLAGKRTADGSEFEKRTADGSEFESPKKKAKVE

SEQ ID NO: 7699 - protein, 2101 aa, synthetic construct
MPAAKRVKLDGGDKKYSIGLDIGTNSVGWAVITDEYKVPSKKFKVLGNTDRHSIKKNLIGALLFDSGETAEATRLKRTARRRYTRRKNRICYLQEIFSNEMAKVDDSFFHRLEESFLVEEDKKHERHPIFGNIVDEVAYHEKYPTIYHLRKKLVDSTDKADLRLIYLALAHMIKFRGHFLIEGDLNPDNSDVDKLFIQLVQTYNQLFEENPINASGVDAKAILSARLSKSRRLENLIAQLPGEKKNGLFGNLIALSLGLTPNFKSNFDLAEDAKLQLSKDTYDDDLDNLLAQIGDQYADLFLAAKNLSDAILLSDILRVNTEITKAPLSASMIKRYDEHHQDLTLLKALVRQQLPEKYKEIFFDQSKNGYAGYIDGGASQEEFYKFIKPILEKMDGTEELLVKLNREDLLRKQRTFDNGSIPHQIHLGELHAILRRQEDFYPFLKDNREKIEKILTFRIPYYVGPLARGNSRFAWMTRKSEETITPWNFEEVVDKGASAQSFIERMTNFDKNLPNEKVLPKHSLLYEYFTVYNELTKVKYVTEGMRKPAFLSGEQKKAIVDLLFKTNRKVTVKQLKEDYFKKIECFDSVEISGVEDRFNASLGTYHDLLKIIKDKDFLDNEENEDILEDIVLTLTLFEDREMIEERLKTYAHLFDDKVMKQLKRRRYTGWGRLSRKLINGIRDKQSGKTILDFLKSDGFANRNFMQLIHDDSLTFKEDIQKAQVSGQGDSLHEHIANLAGSPAIKKGILQTVKVVDELVKVMGRHKPENIVIEMARENQTTQKGQKNSRERMKRIEEGIKELGSQILKEHPVENTQLQNEKLYLYYLQNGRDMYVDQELDINRLSDYDVDHIVPQSFLKDDSIDNKVLTRSDKARGKSDNVPSEEVVKKMKNYWRQLLNAKLITQRKFDNLTKAERGGLSELDKAGFIKRQLVETRQITKHVAQILDSRMNTKYDENDKLIREVKVITLKSKLVSDFRKDFQFYKVREINNYHHAHDAYLNAVVGTALIKKYPKLESEFVYGDYKVYDVRKMIAKSEQEIGKATAKYFFYSNIMNFFKTEITLANGEIRKRPLIETNGETGEIVWDKGRDFATVRKVLSMPQVNIVKKTEVQTGGFSKESILPKRNSDKLIARKKDWDPKKYGGFDSPTVAYSVLVVAKVEKGKSKKLKSVKELLGITIMERSSFEKNPIDFLEAKGYKEVKKDLIIKLPKYSLFELENGRKRMLASAGELQKGNELALPSKYVNFLYLASHYEKLKGSPEDNEQKQLFVEQHKHYLDEIIEQISEFSKRVILADANLDKVLSAYNKHRDKPIREQAENIIHLFTLTNLGAPAAFKYFDTTIDRKRYTSTKEVLDATLIHQSITGLYETRIDLSQLGGDGGSGSETPGTSESATPESGGTLNIEDEYRLHETSKEPDVSLGSTWLSDFPQAWAETGGMGLAVRQAPLIIPLKATSTPVSIKQYPMSQEARLGIKPHIQRLLDQGILVPCQSPWNTPLLPVKKPGTNDYRPVQDLREVNKRVEDIHPTVPNPYNLLSGLPPSHQWYTVLDLKDAFFCLRLHPTSQPLFAFEWRDPEMGISGQLTWTRLPQGFKNSPTLFNEALHRDLAGFRIQHPDLILLQYVDDLLLAATSELDCQQGTRALLQTLGDLGYRASAKKAQICQKQVKYLGYLLKEGQRWLTEARKETVMGQPIPKTPRQLREFLGTAGFCRLWIPGFAEMAAPLYPLTKPGTLFNWGPDQQKAFQEIKQALLTAPALGLPDLTKPFELFVDEKQGYAKGVLTQKLGPWRRPVAYLSKKLDPVAAGWPPCLRMVAAIAVLTKDAGKLTMGQPLVILAPHAVEALVKQPPDRWLSNARMTHYQALLLDTDRVQFGPVVALNPATLLPLPEEGLQHDCLDILAEAHGTRSDLMDQPLPDADHTWYTDGSSFLQEGQRKAGAAVTTETEVIWARALPAGTSAQRAELIALTQALKMAEGKKLNVYTDSRYAFATAHIHGEIYRRRGWLTSEGKEIKNKDEILALLKALFLPKRLSIIHCPGHQKGNSAEARGNRMADQAAREVATRETPETSTLLAGKRTADGSEFEKRTADGSEFESPKKKAKVE

SEQ ID NO: 7700 - protein, 2101 aa, synthetic construct
MPAAKRVKLDGGDKKYSIGLDIGTNSVGWAVITDEYKVPSKKFKVLGNTDRHSIKKNLIGALLFDSGETAEATRLKRTARRRYTRRKNRICYLQEIFSNEMAKVDDSFFHRLEESFLVEEDKKHERHPIFGNIVDEVAYHEKYPTIYHLRKKLVDSTDKADLRLIYLALAHMIKFRGHFLIEGDLNPDNSDVDKLFIQLVQTYNQLFEENPINASGVDAKAILSARLSKSRRLENLIAQLPGEKKNGLFGNLIALSLGLTPNFKSNFDLAEDAKLQLSKDTYDDDLDNLLAQIGDQYADLFLAAKNLSDAILLSDILRVNTEITKAPLSASMIKRYDEHHQDLTLLKALVRQQLPEKYKEIFFDQSKNGYAGYIDGGASQEEFYKFIKPILEKMDGTEELLVKLNREDLLRKQRTFDNGSIPHQIHLGELHAILRRQEDFYPFLKDNREKIEKILTFRIPYYVGPLARGNSRFAWMTRKSEETITPWNFEEVVDKGASAQSFIERMTNFDKNLPNEKVLPKHSLLYEYFTVYNELTKVKYVTEGMRKPAFLSGEQKKAIVDLLFKTNRKVTVKQLKEDYFKKIECFDSVEISGVEDRFNASLGTYHDLLKIIKDKDFLDNEENEDILEDIVLTLTLFEDREMIEERLKTYAHLFDDKVMKQLKRRRYTGWGRLSRKLINGIRDKQSGKTILDFLKSDGFANRNFMQLIHDDSLTFKEDIQKAQVSGQGDSLHEHIANLAGSPAIKKGILQTVKVVDELVKVMGRHKPENIVIEMARENQTTQKGQKNSRERMKRIEEGIKELGSQILKEHPVENTQLQNEKLYLYYLQNGRDMYVDQELDINRLSDYDVDHIVPQSFLKDDSIDNKVLTRSDKARGKSDNVPSEEVVKKMKNYWRQLLNAKLITQRKFDNLTKAERGGLSELDKAGFIKRQLVETRQITKHVAQILDSRMNTKYDENDKLIREVKVITLKSKLVSDFRKDFQFYKVREINNYHHAHDAYLNAVVGTALIKKYPKLESEFVYGDYKVYDVRKMIAKSEQEIGKATAKYFFYSNIMNFFKTEITLANGEIRKRPLIETNGETGEIVWDKGRDFATVRKVLSMPQVNIVKKTEVQTGGFSKESILPKRNSDKLIARKKDWDPKKYGGFDSPTVAYSVLVVAKVEKGKSKKLKSVKELLGITIMERSSFEKNPIDFLEAKGYKEVKKDLIIKLPKYSLFELENGRKRMLASAGELQKGNELALPSKYVNFLYLASHYEKLKGSPEDNEQKQLFVEQHKHYLDEIIEQISEFSKRVILADANLDKVLSAYNKHRDKPIREQAENIIHLFTLTNLGAPAAFKYFDTTIDRKRYTSTKEVLDATLIHQSITGLYETRIDLSQLGGDGGSGSETPGTSESATPESGGTLNIEDEYRLHETSKGPDVPLGSTWLSDFPQAWAETGGMGLAVRQAPLIIPLKATSTPVSIKQYPMSQEARLGIKPHIQRLLDQGILVPCQSPWNTPLLPVKKPGTNDYRPVQDLREVNKRVEDIHPTVPNPYNLLSGLPPSHQWYTVLDLKDAFFCLRLHPTSQSLFAFEWRDPEMGISGQLTWTRLPQGFKNSPTLFDEALHRDLADFRIQHPDLILLQYVDDLLLAATSELDCQQGTRALLQTLGDLGYRASAKKAQICQKQVKYLGYLLKEGQRWLTEARKETVMGQPTPKTPRQLREFLGTAGFCRLWIPGFAEMAAPLYPLTKTGTLFEWGPDQQKAYQEIKQALLTAPALGLPDLTKPFELFVDEKQGYAKGVLTQKLGPWRRPVAYLSKKLDPVAAGWPPCLRMVAAIAVLTKDAGKLTMGQPLVILAPHAVEALVKQPPDRWLSNARMTHYQALLLDTDRVQFGPIVALNPATLLPLPEEGLQHDCLDILAEAHGTRPDLTDQPLPDADHTWYTDGSSFLQEGQRKAGAAVTTETEVVWAKALPAGTSAQRAELIALTQALKMAEGKKLNVYTDSRYAFATAHIHGEIYRRRGLLTSEGKEIKNKDEILALLKALFLPKRLSIIHCPGHQKGNRAEARGNRMADQAAREVATRETPETSTLLAGKRTADGSEFEKRTADGSEFESPKKKAKVE

SEQ ID NO: 7701 - protein, 2095 aa, synthetic construct
MPAAKRVKLDGGDKKYSIGLDIGTNSVGWAVITDEYKVPSKKFKVLGNTDRHSIKKNLIGALLFDSGETAEATRLKRTARRRYTRRKNRICYLQEIFSNEMAKVDDSFFHRLEESFLVEEDKKHERHPIFGNIVDEVAYHEKYPTIYHLRKKLVDSTDKADLRLIYLALAHMIKFRGHFLIEGDLNPDNSDVDKLFIQLVQTYNQLFEENPINASGVDAKAILSARLSKSRRLENLIAQLPGEKKNGLFGNLIALSLGLTPNFKSNFDLAEDAKLQLSKDTYDDDLDNLLAQIGDQYADLFLAAKNLSDAILLSDILRVNTEITKAPLSASMIKRYDEHHQDLTLLKALVRQQLPEKYKEIFFDQSKNGYAGYIDGGASQEEFYKFIKPILEKMDGTEELLVKLNREDLLRKQRTFDNGSIPHQIHLGELHAILRRQEDFYPFLKDNREKIEKILTFRIPYYVGPLARGNSRFAWMTRKSEETITPWNFEEVVDKGASAQSFIERMTNFDKNLPNEKVLPKHSLLYEYFTVYNELTKVKYVTEGMRKPAFLSGEQKKAIVDLLFKTNRKVTVKQLKEDYFKKIECFDSVEISGVEDRFNASLGTYHDLLKIIKDKDFLDNEENEDILEDIVLTLTLFEDREMIEERLKTYAHLFDDKVMKQLKRRRYTGWGRLSRKLINGIRDKQSGKTILDFLKSDGFANRNFMQLIHDDSLTFKEDIQKAQVSGQGDSLHEHIANLAGSPAIKKGILQTVKVVDELVKVMGRHKPENIVIEMARENQTTQKGQKNSRERMKRIEEGIKELGSQILKEHPVENTQLQNEKLYLYYLQNGRDMYVDQELDINRLSDYDVDHIVPQSFLKDDSIDNKVLTRSDKARGKSDNVPSEEVVKKMKNYWRQLLNAKLITQRKFDNLTKAERGGLSELDKAGFIKRQLVETRQITKHVAQILDSRMNTKYDENDKLIREVKVITLKSKLVSDFRKDFQFYKVREINNYHHAHDAYLNAVVGTALIKKYPKLESEFVYGDYKVYDVRKMIAKSEQEIGKATAKYFFYSNIMNFFKTEITLANGEIRKRPLIETNGETGEIVWDKGRDFATVRKVLSMPQVNIVKKTEVQTGGFSKESILPKRNSDKLIARKKDWDPKKYGGFDSPTVAYSVLVVAKVEKGKSKKLKSVKELLGITIMERSSFEKNPIDFLEAKGYKEVKKDLIIKLPKYSLFELENGRKRMLASAGELQKGNELALPSKYVNFLYLASHYEKLKGSPEDNEQKQLFVEQHKHYLDEIIEQISEFSKRVILADANLDKVLSAYNKHRDKPIREQAENIIHLFTLTNLGAPAAFKYFDTTIDRKRYTSTKEVLDATLIHQSITGLYETRIDLSQLGGDGGSGSETPGTSESATPESGGTLQLDDEYRLYSPLVKPDQNIQFWLEQFPQAWAETAGMGLAKQVPPQVIQLKASATPVSVRQYPLSKEAQEGIRPHVQRLIQQGILVPVQSPWNTPLLPVRKPGTNDYRPVQDLREVNKRVQDIHPTVPNPYNLLCALPPQRSWYTVLDLKDAFFCLRLHPTSQPLFAFEWRDPGTGRTGQLTWTRLPQGFKNSPTIFDEALHRDLANFRIQHPQVTLLQYVDDLLLAGATKQDCLEGTKALLLELSDLGYRASAKKAQICRREVTYLGYSLRDGQRWLTEARKKTVVQIPAPTTAKQVREFLGTAGFCRLWIPGFATLAAPLYPLTKEKGEFSWAPEHQKAFDAIKKALLSAPALALPDVTKPFTLYVDERKGVARGVLTQTLGPWRRPVAYLSKKLDPVASGWPVCLKAIAAVAILVKDADKLTLGQNITVIAPHALENIVRQPPDRWMTNARMTHYQSLLLTERVTFAPPAALNPATLLPEETDEPVTHDCHQLLIEETGVRKDLTDIPLTGEVLTWFTDGSSYVVEGKRMAGAAVVDGTRTIWASSLPEGTSAQKAELMALTQALRLAEGKSINIYTDSRYAFATAHVHGAIYKQRGLLTSAGREIKNKEEILSLLEALHLPKRLAIIHCPGHQKAKDPISRGNQMADRVAKQAAQGVNLLAGKRTADGSEFEKRTADGSEFESPKKKAKVE

SEQ ID NO: 7702 - protein, 2095 aa, synthetic construct; identical to SEQ ID NO: 7701

SEQ ID NO: 7703 - protein, 2181 aa, synthetic construct
MPAAKRVKLDGGDKKYSIGLDIGTNSVGWAVITDEYKVPSKKFKVLGNTDRHSIKKNLIGALLFDSGETAEATRLKRTARRRYTRRKNRICYLQEIFSNEMAKVDDSFFHRLEESFLVEEDKKHERHPIFGNIVDEVAYHEKYPTIYHLRKKLVDSTDKADLRLIYLALAHMIKFRGHFLIEGDLNPDNSDVDKLFIQLVQTYNQLFEENPINASGVDAKAILSARLSKSRRLENLIAQLPGEKKNGLFGNLIALSLGLTPNFKSNFDLAEDAKLQLSKDTYDDDLDNLLAQIGDQYADLFLAAKNLSDAILLSDILRVNTEITKAPLSASMIKRYDEHHQDLTLLKALVRQQLPEKYKEIFFDQSKNGYAGYIDGGASQEEFYKFIKPILEKMDGTEELLVKLNREDLLRKQRTFDNGSIPHQIHLGELHAILRRQEDFYPFLKDNREKIEKILTFRIPYYVGPLARGNSRFAWMTRKSEETITPWNFEEVVDKGASAQSFIERMTNFDKNLPNEKVLPKHSLLYEYFTVYNELTKVKYVTEGMRKPAFLSGEQKKAIVDLLFKTNRKVTVKQLKEDYFKKIECFDSVEISGVEDRFNASLGTYHDLLKIIKDKDFLDNEENEDILEDIVLTLTLFEDREMIEERLKTYAHLFDDKVMKQLKRRRYTGWGRLSRKLINGIRDKQSGKTILDFLKSDGFANRNFMQLIHDDSLTFKEDIQKAQVSGQGDSLHEHIANLAGSPAIKKGILQTVKVVDELVKVMGRHKPENIVIEMARENQTTQKGQKNSRERMKRIEEGIKELGSQILKEHPVENTQLQNEKLYLYYLQNGRDMYVDQELDINRLSDYDVDHIVPQSFLKDDSIDNKVLTRSDKARGKSDNVPSEEVVKKMKNYWRQLLNAKLITQRKFDNLTKAERGGLSELDKAGFIKRQLVETRQITKHVAQILDSRMNTKYDENDKLIREVKVITLKSKLVSDFRKDFQFYKVREINNYHHAHDAYLNAVVGTALIKKYPKLESEFVYGDYKVYDVRKMIAKSEQEIGKATAKYFFYSNIMNFFKTEITLANGEIRKRPLIETNGETGEIVWDKGRDFATVRKVLSMPQVNIVKKTEVQTGGFSKESILPKRNSDKLIARKKDWDPKKYGGFDSPTVAYSVLVVAKVEKGKSKKLKSVKELLGITIMERSSFEKNPIDFLEAKGYKEVKKDLIIKLPKYSLFELENGRKRMLASAGELQKGNELALPSKYVNFLYLASHYEKLKGSPEDNEQKQLFVEQHKHYLDEIIEQISEFSKRVILADANLDKVLSAYNKHRDKPIREQAENIIHLFTLTNLGAPAAFKYFDTTIDRKRYTSTKEVLDATLIHQSITGLYETRIDLSQLGGDGGSGSETPGTSESATPESGGMDPLQLLQPLEAEIKGTKLKAHWNSGATITCVPEAFLEDERPIQTMLIKTIHGEKQQDVYYLTFKVQGRKVEAEVLASPYDYILLNPSDVPWLMKKPLQLTVLVPLHEYQERLLQQTALPKEQKELLQKLFLKYDALWQHWENQVGHRRIKPHNIATGTLAPRPQKQYPINPKAKPSIQIVIDDLLKQGVLIQQNSTMNTPVYPVPKPDGKWRMVLDYREVNKTIPLIAAQNQHSAGILSSIYRGKYKTTLDLTNGFWAHPITPESYWLTAFTWQGKQYCWTRLPQGFLNSPALFNADVVDLLKEIPNVQAYVDDIYISHDDPQEHLEQLEKIFSILLNAGYVVSLKKSEIAQREVEFLGFNITKEGRGLTDTFKQKLLNITPPKDLKQLQSILGLLNFARNFIPNYSELVKPLYTIVAPANGKFISWTEDNSNQLQHIISVLNQADNLEERNPETRLIIKVNSSPSAGYIRYYNEGSKRPIMYVNYIFSKAEAKFTQTEKLLTTMHKGLIKAMDLAMGQEILVYSPIVSMTKIQRTPLPERKALPVRWITWMTYLEDPRIQFHYDKSLPELQQIPNVTEDVIAKTKHPSEFAMVFYTDGSAIKHPDVNKSHSAGMGIAQVQFIPEYKIVHQWSIPLGDHTAQLAEIAAVEFACKKALKISGPVLIVTDSFYVAESANKELPYWKSNGFLNNKKKPLRHVSKWKSIAECLQLKPDIIIMHEKGHQQPMTTLHTEGNNLADKLATQGSYVVHAGKRTADGSEFEKRTADGSEFESPKKKAKVE

SEQ ID NO: 7704 - protein, 2092 aa, synthetic construct
MPAAKRVKLDGGDKKYSIGLDIGTNSVGWAVITDEYKVPSKKFKVLGNTDRHSIKKNLIGALLFDSGETAEATRLKRTARRRYTRRKNRICYLQEIFSNEMAKVDDSFFHRLEESFLVEEDKKHERHPIFGNIVDEVAYHEKYPTIYHLRKKLVDSTDKADLRLIYLALAHMIKFRGHFLIEGDLNPDNSDVDKLFIQLVQTYNQLFEENPINASGVDAKAILSARLSKSRRLENLIAQLPGEKKNGLFGNLIALSLGLTPNFKSNFDLAEDAKLQLSKDTYDDDLDNLLAQIGDQYADLFLAAKNLSDAILLSDILRVNTEITKAPLSASMIKRYDEHHQDLTLLKALVRQQLPEKYKEIFFDQSKNGYAGYIDGGASQEEFYKFIKPILEKMDGTEELLVKLNREDLLRKQRTFDNGSIPHQIHLGELHAILRRQEDFYPFLKDNREKIEKILTFRIPYYVGPLARGNSRFAWMTRKSEETITPWNFEEVVDKGASAQSFIERMTNFDKNLPNEKVLPKHSLLYEYFTVYNELTKVKYVTEGMRKPAFLSGEQKKAIVDLLFKTNRKVTVKQLKEDYFKKIECFDSVEISGVEDRFNASLGTYHDLLKIIKDKDFLDNEENEDILEDIVLTLTLFEDREMIEERLKTYAHLFDDKVMKQLKRRRYTGWGRLSRKLINGIRDKQSGKTILDFLKSDGFANRNFMQLIHDDSLTFKEDIQKAQVSGQGDSLHEHIANLAGSPAIKKGILQTVKVVDELVKVMGRHKPENIVIEMARENQTTQKGQKNSRERMKRIEEGIKELGSQILKEHPVENTQLQNEKLYLYYLQNGRDMYVDQELDINRLSDYDVDHIVPQSFLKDDSIDNKVLTRSDKARGKSDNVPSEEVVKKMKNYWRQLLNAKLITQRKFDNLTKAERGGLSELDKAGFIKRQLVETRQITKHVAQILDSRMNTKYDENDKLIREVKVITLKSKLVSDFRKDFQFYKVREINNYHHAHDAYLNAVVGTALIKKYPKLESEFVYGDYKVYDVRKMIAKSEQEIGKATAKYFFYSNIMNFFKTEITLANGEIRKRPLIETNGETGEIVWDKGRDFATVRKVLSMPQVNIVKKTEVQTGGFSKESILPKRNSDKLIARKKDWDPKKYGGFDSPTVAYSVLVVAKVEKGKSKKLKSVKELLGITIMERSSFEKNPIDFLEAKGYKEVKKDLIIKLPKYSLFELENGRKRMLASAGELQKGNELALPSKYVNFLYLASHYEKLKGSPEDNEQKQLFVEQHKHYLDEIIEQISEFSKRVILADANLDKVLSAYNKHRDKPIREQAENIIHLFTLTNLGAPAAFKYFDTTIDRKRYTSTKEVLDATLIHQSITGLYETRIDLSQLGGDGGSGSETPGTSESATPESGGIPWLMKKPLQLTTLVPLQEYEERLLKQTMLTGSYKEKLQSLFLKYDALWQHWENQVGHRRIKPHHIATGTVNPRPQKQYPINPKAKASIQTVINDLLKQGVLIQQNSIMNTPVYPVPKPDGKWRMVLDYREVNKTIPLIAAQNQHSAGILSSIFRGKYKTTLDLSNGFWAHSITPESYWLTAFTWLGQQYCWTRLPQGFLNSPALFTADVVDLLKEVPNVQVYVDDIYISHDDPREHLEQLEKVFSLLLNAGYVVSLKKSEIAQHEVEFLGFNITKEGRGLTETFKQKLLNITPPRDLKQLQSILGLLNFARNFIPNFSELVKPLYNIIATANGKYITWTTDNSQQLQNIISMLNSAENLEERNPEVRLIMKVNTSPSAGYIRFYNEFAKRPIMYLNYVYTKAEVKFTNTEKLLTTIHKGLIKALDLGMGQEILVYSPIVSMTKIQKTPLPERKALPIRWITWMSYLEDPRIQFHYDKTLPELQQVPTVTDDIIAKIKHPSEFSMVFYTDGSAIKHPNVNKSHNAGMGIAQVQFKPEFTVINTWSIPLGDHTAQLAEVAAVEFACKKALKIDGPVLIVTDSFYVAESVNKELPYWQSNGFFNNKKKPLKHVSKWKSIADCIQLKPDIIIIHEKGHQPTASTFHTEGNNLADKLATQGSYVVNAGKRTADGSEFEKRTADGSEFESPKKKAKVE

SEQ ID NO: 7705 - protein, 2181 aa, synthetic construct
MPAAKRVKLDGGDKKYSIGLDIGTNSVGWAVITDEYKVPSKKFKVLGNTDRHSIKKNLIGALLFDSGETAEATRLKRTARRRYTRRKNRICYLQEIFSNEMAKVDDSFFHRLEESFLVEEDKKHERHPIFGNIVDEVAYHEKYPTIYHLRKKLVDSTDKADLRLIYLALAHMIKFRGHFLIEGDLNPDNSDVDKLFIQLVQTYNQLFEENPINASGVDAKAILSARLSKSRRLENLIAQLPGEKKNGLFGNLIALSLGLTPNFKSNFDLAEDAKLQLSKDTYDDDLDNLLAQIGDQYADLFLAAKNLSDAILLSDILRVNTEITKAPLSASMIKRYDEHHQDLTLLKALVRQQLPEKYKEIFFDQSKNGYAGYIDGGASQEEFYKFIKPILEKMDGTEELLVKLNREDLLRKQRTFDNGSIPHQIHLGELHAILRRQEDFYPFLKDNREKIEKILTFRIPYYVGPLARGNSRFAWMTRKSEETITPWNFEEVVDKGASAQSFIERMTNFDKNLPNEKVLPKHSLLYEYFTVYNELTKVKYVTEGMRKPAFLSGEQKKAIVDLLFKTNRKVTVKQLKEDYFKKIECFDSVEISGVEDRFNASLGTYHDLLKIIKDKDFLDNEENEDILEDIVLTLTLFEDREMIEERLKTYAHLFDDKVMKQLKRRRYTGWGRLSRKLINGIRDKQSGKTILDFLKSDGFANRNFMQLIHDDSLTFKEDIQKAQVSGQGDSLHEHIANLAGSPAIKKGILQTVKVVDELVKVMGRHKPENIVIEMARENQTTQKGQKNSRERMKRIEEGIKELGSQILKEHPVENTQLQNEKLYLYYLQNGRDMYVDQELDINRLSDYDVDHIVPQSFLKDDSIDNKVLTRSDKARGKSDNVPSEEVVKKMKNYWRQLLNAKLITQRKFDNLTKAERGGLSELDKAGFIKRQLVETRQITKHVAQILDSRMNTKYDENDKLIREVKVITLKSKLVSDFRKDFQFYKVREINNYHHAHDAYLNAVVGTALIKKYPKLESEFVYGDYKVYDVRKMIAKSEQEIGKATAKYFFYSNIMNFFKTEITLANGEIRKRPLIETNGETGEIVWDKGRDFATVRKVLSMPQVNIVKKTEVQTGGFSKESILPKRNSDKLIARKKDWDPKKYGGFDSPTVAYSVLVVAKVEKGKSKKLKSVKELLGITIMERSSFEKNPIDFLEAKGYKEVKKDLIIKLPKYSLFELENGRKRMLASAGELQKGNELALPSKYVNFLYLASHYEKLKGSPEDNEQKQLFVEQHKHYLDEIIEQISEFSKRVILADANLDKVLSAYNKHRDKPIREQAENIIHLFTLTNLGAPAAFKYFDTTIDRKRYTSTKEVLDATLIHQSITGLYETRIDLSQLGGDGGSGSETPGTSESATPESGGMDPLQLLQPLEAEIKGTKLKAHWNSGATITCVPQAFLEEEVPIKNIWIKTIHGEKEQPVYYLTFKIQGRKVEAEVISSPYDYILVSPSDIPWLMKKPLQLTTLVPLQEYEERLLKQTMLTGSYKEKLQSLFLKYDALWQHWENQVGHRRIKPHHIATGTVNPRPQKQYPINPKAKASIQTVINDLLKQGVLIQQNSIMNTPVYPVPKPDGKWRMVLDYREVNKTIPLIAAQNQHSAGILSSIFRGKYKTTLDLSNGFWAHSITPESYWLTAFTWLGQQYCWTRLPQGFLNSPALFNADVVDLLKEVPNVQVYVDDIYISHDDPREHLEQLEKVFSLLLNAGYVVSLKKSEIAQHEVEFLGFNITKEGRGLTETFKQKLLNITPPRDLKQLQSILGLLNFARNFIPNFSELVKPLYNIIATAPGKYITWTTDNSQQLQNIISMLNSAENLEERNPEVRLIMKVNTSPSAGYIRFYNEFAKRPIMYLNYVYTKAEVKFTNTEKLLTTIHKGLIKALDLGMGQEILVYSPIVSMTKIQKTPLPERKALPIRWITWMSYLEDPRIQFHYDKTLPELQQVPTVTDDIIAKIKHPSEFSMVFYTDGSAIKHPNVNKSHNAGMGIAQVQFKPEFTVINTWSIPLGDHTAQLAEVAAVEFACKKALKIDGPVLIVTDSFYVAESVNKELPYWQSNGFFNNKKKPLKHVSKWKSIADCIQLKPDIIIIHEKGHQPTASTFHTEGNNLADKLATQGSYVVNAGKRTADGSEFEKRTADGSEFESPKKKAKVE

SEQ ID NO: 7706 - protein, 2101 aa, synthetic construct
MPAAKRVKLDGGDKKYSIGLDIGTNSVGWAVITDEYKVPSKKFKVLGNTDRHSIKKNLIGALLFDSGETAEATRLKRTARRRYTRRKNRICYLQEIFSNEMAKVDDSFFHRLEESFLVEEDKKHERHPIFGNIVDEVAYHEKYPTIYHLRKKLVDSTDKADLRLIYLALAHMIKFRGHFLIEGDLNPDNSDVDKLFIQLVQTYNQLFEENPINASGVDAKAILSARLSKSRRLENLIAQLPGEKKNGLFGNLIALSLGLTPNFKSNFDLAEDAKLQLSKDTYDDDLDNLLAQIGDQYADLFLAAKNLSDAILLSDILRVNTEITKAPLSASMIKRYDEHHQDLTLLKALVRQQLPEKYKEIFFDQSKNGYAGYIDGGASQEEFYKFIKPILEKMDGTEELLVKLNREDLLRKQRTFDNGSIPHQIHLGELHAILRRQEDFYPFLKDNREKIEKILTFRIPYYVGPLARGNSRFAWMTRKSEETITPWNFEEVVDKGASAQSFIERMTNFDKNLPNEKVLPKHSLLYEYFTVYNELTKVKYVTEGMRKPAFLSGEQKKAIVDLLFKTNRKVTVKQLKEDYFKKIECFDSVEISGVEDRFNASLGTYHDLLKIIKDKDFLDNEENEDILEDIVLTLTLFEDREMIEERLKTYAHLFDDKVMKQLKRRRYTGWGRLSRKLINGIRDKQSGKTILDFLKSDGFANRNFMQLIHDDSLTFKEDIQKAQVSGQGDSLHEHIANLAGSPAIKKGILQTVKVVDELVKVMGRHKPENIVIEMARENQTTQKGQKNSRERMKRIEEGIKELGSQILKEHPVENTQLQNEKLYLYYLQNGRDMYVDQELDINRLSDYDVDHIVPQSFLKDDSIDNKVLTRSDKARGKSDNVPSEEVVKKMKNYWRQLLNAKLITQRKFDNLTKAERGGLSELDKAGFIKRQLVETRQITKHVAQILDSRMNTKYDENDKLIREVKVITLKSKLVSDFRKDFQFYKVREINNYHHAHDAYLNAVVGTALIKKYPKLESEFVYGDYKVYDVRKMIAKSEQEIGKATAKYFFYSNIMNFFKTEITLANGEIRKRPLIETNGETGEIVWDKGRDFATVRKVLSMPQVNIVKKTEVQTGGFSKESILPKRNSDKLIARKKDWDPKKYGGFDSPTVAYSVLVVAKVEKGKSKKLKSVKELLGITIMERSSFEKNPIDFLEAKGYKEVKKDLIIKLPKYSLFELENGRKRMLASAGELQKGNELALPSKYVNFLYLASHYEKLKGSPEDNEQKQLFVEQHKHYLDEIIEQISEFSKRVILADANLDKVLSAYNKHRDKPIREQAENIIHLFTLTNLGAPAAFKYFDTTIDRKRYTSTKEVLDATLIHQSITGLYETRIDLSQLGGDGGSGSETPGTSESATPESGGTLNIEDEYRLHETSKEPDVPLGSTWLSDFPQAWAETGGMGLAVRQAPLIIPLKATSTPVSIKQYPMSQEARLGIKPHIQRLLDQGILVPCQSPWNTPLLPVKKPGTNDYRPVQDLREVNKRVEDIHPTVPNPYNLLSGLPPSHQWYTVLDLKDAFFCLRLHPTSQPLFAFEWRDPEMGISGQLTWTRLPQGFKNSPTLFNEALHRDLADFRIQHPDLILLQYVDDLLLAATSEQDCQRGTRALLQTLGNLGYRASAKKAQICQKQVKYLGYLLKEGQRWLTEARKETVMGQPTPKTPRQLREFLGTAGFCRLWIPGFAEMAAPLYPLTKPGTLFNWGPDQQKAYQEIKQALLTAPALGLPDLTKPFELFVDEKQGYAKGVLTQKLGPWRRPVAYLSKKLDPVAAGWPPCLRMVAAIAVLTKDAGKLTMGQPLVILAPHAVEALVKQPPDRWLSNARMTHYQAMLLDTDRVQFGPVVALNPATLLPLPEKEAPHDCLEILAETHGTRPDLTDQPIPDADYTWYTDGSSFLQEGQRRAGAAVTTETEVIWARALPAGTSAQRAELIALTQALKMAEGKKLNVYTDSRYAFATAHVHGEIYRRRGWLTSEGREIKNKNEILALLKALFLPKRLSIIHCPGHQKGNSAEARGNRMADQAAREAAMKAVLETSTLLAGKRTADGSEFEKRTADGSEFESPKKKAKVE

SEQ ID NO: 7707 - protein, 2099 aa, synthetic construct
MPAAKRVKLDGGDKKYSIGLDIGTNSVGWAVITDEYKVPSKKFKVLGNTDRHSIKKNLIGALLFDSGETAEATRLKRTARRRYTRRKNRICYLQEIFSNEMAKVDDSFFHRLEESFLVEEDKKHERHPIFGNIVDEVAYHEKYPTIYHLRKKLVDSTDKADLRLIYLALAHMIKFRGHFLIEGDLNPDNSDVDKLFIQLVQTYNQLFEENPINASGVDAKAILSARLSKSRRLENLIAQLPGEKKNGLFGNLIALSLGLTPNFKSNFDLAEDAKLQLSKDTYDDDLDNLLAQIGDQYADLFLAAKNLSDAILLSDILRVNTEITKAPLSASMIKRYDEHHQDLTLLKALVRQQLPEKYKEIFFDQSKNGYAGYIDGGASQEEFYKFIKPILEKMDGTEELLVKLNREDLLRKQRTFDNGSIPHQIHLGELHAILRRQEDFYPFLKDNREKIEKILTFRIPYYVGPLARGNSRFAWMTRKSEETITPWNFEEVVDKGASAQSFIERMTNFDKNLPNEKVLPKHSLLYEYFTVYNELTKVKYVTEGMRKPAFLSGEQKKAIVDLLFKTNRKVTVKQLKEDYFKKIECFDSVEISGVEDRFNASLGTYHDLLKIIKDKDFLDNEENEDILEDIVLTLTLFEDREMIEERLKTYAHLFDDKVMKQLKRRRYTGWGRLSRKLINGIRDKQSGKTILDFLKSDGFANRNFMQLIHDDSLTFKEDIQKAQVSGQGDSLHEHIANLAGSPAIKKGILQTVKVVDELVKVMGRHKPENIVIEMARENQTTQKGQKNSRERMKRIEEGIKELGSQILKEHPVENTQLQNEKLYLYYLQNGRDMYVDQELDINRLSDYDVDHIVPQSFLKDDSIDNKVLTRSDKARGKSDNVPSEEVVKKMKNYWRQLLNAKLITQRKFDNLTKAERGGLSELDKAGFIKRQLVETRQITKHVAQILDSRMNTKYDENDKLIREVKVITLKSKLVSDFRKDFQFYKVREINNYHHAHDAYLNAVVGTALIKKYPKLESEFVYGDYKVYDVRKMIAKSEQEIGKATAKYFFYSNIMNFFKTEITLANGEIRKRPLIETNGETGEIVWDKGRDFATVRKVLSMPQVNIVKKTEVQTGGFSKESILPKRNSDKLIARKKDWDPKKYGGFDSPTVAYSVLVVAKVEKGKSKKLKSVKELLGITIMERSSFEKNPIDFLEAKGYKEVKKDLIIKLPKYSLFELENGRKRMLASAGELQKGNELALPSKYVNFLYLASHYEKLKGSPEDNEQKQLFVEQHKHYLDEIIEQISEFSKRVILADANLDKVLSAYNKHRDKPIREQAENIIHLFTLTNLGAPAAFKYFDTTIDRKRYTSTKEVLDATLIHQSITGLYETRIDLSQLGGDGGGSAGSAAGSGEFGGTAPLEEEYRLFLEAPIQNVTLLEQWKREIPKVWAEINPPGLASTQAPIHVQLLSTALPVRVRQYPITLEAKRSLRETIRKFRAAGILRPVHSPWNTPLLPVRKSGTSEYRMVQDLREVNKRVETIHPTVPNPYTLLSLLPPDRIWYSVLDLKDAFFCIPLAPESQLIFAFEWADAEEGESGQLTWTRLPQGFKNSPTLFNEALNRDLQGFRLDHPSVSLLQYVDDLLIAADTQAACLSATRDLLMTLAELGYRVSGKKAQLCQEEVTYLGFKIHKGSRSLSNSRTQAILQIPVPKTKRQVREFLGTIGYCRLWIPGFAELAQPLYAATRPGNDPLVWGEKEEEAFQSLKLALTQPPALALPSLDKPFQLFVEETSGAAKGVLTQALGPWKRPVAYLSKRLDPVAAGWPRCLRAIAAAALLTREASKLTFGQDIEITSSHNLESLLRSPPDKWLTNARITQYQVLLLDPPRVRFKQTAALNPATLLPETDDTLPIHHCLDTLDSLTSTRPDLTDQPLAQAEATLFTDGSSYIRDGKRYAGAAVVTLDSVIWAEPLPIGTSAQKAELIALTKALEWSKDKSVNIYTDSRYAFATLHVHGMIYRERGWLTAGGKAIKNAPEILALLTAVWLPKRVAVMHCKGHQKDDAPTSTGNRRADEVAREVAIRPLSTQATISAGKRTADGSEFEKRTADGSEFESPKKKAKVE

SEQ ID NO: 7708 - protein, 2002 aa, synthetic construct
MPAAKRVKLDGGDKKYSIGLDIGTNSVGWAVITDEYKVPSKKFKVLGNTDRHSIKKNLIGALLFDSGETAEATRLKRTARRRYTRRKNRICYLQEIFSNEMAKVDDSFFHRLEESFLVEEDKKHERHPIFGNIVDEVAYHEKYPTIYHLRKKLVDSTDKADLRLIYLALAHMIKFRGHFLIEGDLNPDNSDVDKLFIQLVQTYNQLFEENPINASGVDAKAILSARLSKSRRLENLIAQLPGEKKNGLFGNLIALSLGLTPNFKSNFDLAEDAKLQLSKDTYDDDLDNLLAQIGDQYADLFLAAKNLSDAILLSDILRVNTEITKAPLSASMIKRYDEHHQDLTLLKALVRQQLPEKYKEIFFDQSKNGYAGYIDGGASQEEFYKFIKPILEKMDGTEELLVKLNREDLLRKQRTFDNGSIPHQIHLGELHAILRRQEDFYPFLKDNREKIEKILTFRIPYYVGPLARGNSRFAWMTRKSEETITPWNFEEVVDKGASAQSFIERMTNFDKNLPNEKVLPKHSLLYEYFTVYNELTKVKYVTEGMRKPAFLSGEQKKAIVDLLFKTNRKVTVKQLKEDYFKKIECFDSVEISGVEDRFNASLGTYHDLLKIIKDKDFLDNEENEDILEDIVLTLTLFEDREMIEERLKTYAHLFDDKVMKQLKRRRYTGWGRLSRKLINGIRDKQSGKTILDFLKSDGFANRNFMQLIHDDSLTFKEDIQKAQVSGQGDSLHEHIANLAGSPAIKKGILQTVKVVDELVKVMGRHKPENIVIEMARENQTTQKGQKNSRERMKRIEEGIKELGSQILKEHPVENTQLQNEKLYLYYLQNGRDMYVDQELDINRLSDYDVDHIVPQSFLKDDSIDNKVLTRSDKARGKSDNVPSEEVVKKMKNYWRQLLNAKLITQRKFDNLTKAERGGLSELDKAGFIKRQLVETRQITKHVAQILDSRMNTKYDENDKLIREVKVITLKSKLVSDFRKDFQFYKVREINNYHHAHDAYLNAVVGTALIKKYPKLESEFVYGDYKVYDVRKMIAKSEQEIGKATAKYFFYSNIMNFFKTEITLANGEIRKRPLIETNGETGEIVWDKGRDFATVRKVLSMPQVNIVKKTEVQTGGFSKESILPKRNSDKLIARKKDWDPKKYGGFDSPTVAYSVLVVAKVEKGKSKKLKSVKELLGITIMERSSFEKNPIDFLEAKGYKEVKKDLIIKLPKYSLFELENGRKRMLASAGELQKGNELALPSKYVNFLYLASHYEKLKGSPEDNEQKQLFVEQHKHYLDEIIEQISEFSKRVILADANLDKVLSAYNKHRDKPIREQAENIIHLFTLTNLGAPAAFKYFDTTIDRKRYTSTKEVLDATLIHQSITGLYETRIDLSQLGGDGGGSAGSAAGSGEFGGGVLDTPPSHIGLEHLPPPPEVPQFPLNLERLQALQDLVHRSLEAGYISPWDGPGNNPVFPVRKPNGAWRFVHDLRATNALTKPIPALSPGPPDLTAPPTHPPHIICLDLKDAFFQIPVEDRFRFYLSFTLPSPGGLQPHRRFAWRVLPQGFINSPALFQRALQEPLRQVSAAFSQSLLVSYMDDILYASPTEEQRSQCYQALAARLRDLGFQVASEKTSQTPSPVPFLGQMVHEQIVTYQSLPTLQISSPISLHQLQAVLGDLQWVSRGTPTTRRPLQLLYSSLKRHHDPRAIIQLSPEQLQGIAELRQALSHNARSRYNEQEPLLAYVHLTRAGSTLVLFQKGAQFPLAYFQTPLTDNQASPWGLLLLLGCQYLQTQALSSYAKPILKYYHNLPKTSLDNWIQSSEDPRVQELLQLWPQISSQGIQPPGPWKTLITRAEVFLTPQFSPDPIPAALCLFSDGATGRGAYCLWKDHLLDFQAVPAPESAQKGELAGLLAGLAAAPPEPVNIWVDSKYLYSLLRTWVLGAWLQPDPVPSYALLYKSLLRHPAIVVGHVRSHSSASHPIASLNNYVDQLAGKRTADGSEFEKRTADGSEFESPKKKAKVE

SEQ ID NO: 7709 - protein, 2088 aa, synthetic construct
MPAAKRVKLDGGDKKYSIGLDIGTNSVGWAVITDEYKVPSKKFKVLGNTDRHSIKKNLIGALLFDSGETAEATRLKRTARRRYTRRKNRICYLQEIFSNEMAKVDDSFFHRLEESFLVEEDKKHERHPIFGNIVDEVAYHEKYPTIYHLRKKLVDSTDKADLRLIYLALAHMIKFRGHFLIEGDLNPDNSDVDKLFIQLVQTYNQLFEENPINASGVDAKAILSARLSKSRRLENLIAQLPGEKKNGLFGNLIALSLGLTPNFKSNFDLAEDAKLQLSKDTYDDDLDNLLAQIGDQYADLFLAAKNLSDAILLSDILRVNTEITKAPLSASMIKRYDEHHQDLTLLKALVRQQLPEKYKEIFFDQSKNGYAGYIDGGASQEEFYKFIKPILEKMDGTEELLVKLNREDLLRKQRTFDNGSIPHQIHLGELHAILRRQEDFYPFLKDNREKIEKILTFRIPYYVGPLARGNSRFAWMTRKSEETITPWNFEEVVDKGASAQSFIERMTNFDKNLPNEKVLPKHSLLYEYFTVYNELTKVKYVTEGMRKPAFLSGEQKKAIVDLLFKTNRKVTVKQLKEDYFKKIECFDSVEISGVEDRFNASLGTYHDLLKIIKDKDFLDNEENEDILEDIVLTLTLFEDREMIEERLKTYAHLFDDKVMKQLKRRRYTGWGRLSRKLINGIRDKQSGKTILDFLKSDGFANRNFMQLIHDDSLTFKEDIQKAQVSGQGDSLHEHIANLAGSPAIKKGILQTVKVVDELVKVMGRHKPENIVIEMARENQTTQKGQKNSRERMKRIEEGIKELGSQILKEHPVENTQLQNEKLYLYYLQNGRDMYVDQELDINRLSDYDVDHIVPQSFLKDDSIDNKVLTRSDKARGKSDNVPSEEVVKKMKNYWRQLLNAKLITQRKFDNLTKAERGGLSELDKAGFIKRQLVETRQITKHVAQILDSRMNTKYDENDKLIREVKVITLKSKLVSDFRKDFQFYKVREINNYHHAHDAYLNAVVGTALIKKYPKLESEFVYGDYKVYDVRKMIAKSEQEIGKATAKYFFYSNIMNFFKTEITLANGEIRKRPLIETNGETGEIVWDKGRDFATVRKVLSMPQVNIVKKTEVQTGGFSKESILPKRNSDKLIARKKDWDPKKYGGFDSPTVAYSVLVVAKVEKGKSKKLKSVKELLGITIMERSSFEKNPIDFLEAKGYKEVKKDLIIKLPKYSLFELENGRKRMLASAGELQKGNELALPSKYVNFLYLASHYEKLKGSPEDNEQKQLFVEQHKHYLDEIIEQISEFSKRVILADANLDKVLSAYNKHRDKPIREQAENIIHLFTLTNLGAPAAFKYFDTTIDRKRYTSTKEVLDATLIHQSITGLYETRIDLSQLGGDGGGSAGSAAGSGEFGGVPWILKKPLELTIKLDLEEQQGTLLNNSILSKKGKEELKQLFEKYSALWQSWENQVGHRRIRPHKIATGTVKPTPQKQYHINPKAKPDIQIVINDLLKQGVLIQKESTMNTPVYPVPKPNGRWRMVLDYRAVNKVTPLIAVQNQHSYGILGSLFKGRYKTTIDLSNGFWAHPIVPEDYWITAFTWQGKQYCWTVLPQGFLNSPGLFTGDVVDLLQGIPNVEVYVDDVYISHDSEKEHLEYLDILFNRLKEAGYIISLKKSNIANSIVDFLGFQITNEGRGLTDTFKEKLENITAPTTLKQLQSILGLLNFARNFIPDFTELIAPLYALIPKSTKNYVPWQIEHSTTLETLITKLNGAEYLQGRKGDKTLIMKVNASYTTGYIRYYNEGEKKPISYVSIVFSKTELKFTELEKLLTTVHKGLLKALDLSMGQNIHVYSPIVSMQNIQKTPQTAKKALASRWLSWLSYLEDPRIRFFYDPQMPALKDLPAVDTGKDNKKHPSNFQHIFYTDGSAITSPTKEGHLNAGMGIVYFINKDGNLQKQQEWSISLGNHTAQFAEIAAFEFALKKCLPLGGNILVVTDSNYVAKAYNEELDVWASNGFVNNRKKPLKHISKWKSVADLKRLRPDVVVTHEPGHQKLDSSPHAYGNNLADQLATQASFKVHAGKRTADGSEFEKRTADGSEFESPKKKAKVE

SEQ ID NO: 7710 - protein, 2088 aa, synthetic construct
MPAAKRVKLDGGDKKYSIGLDIGTNSVGWAVITDEYKVPSKKFKVLGNTDRHSIKKNLIGALLFDSGETAEATRLKRTARRRYTRRKNRICYLQEIFSNEMAKVDDSFFHRLEESFLVEEDKKHERHPIFGNIVDEVAYHEKYPTIYHLRKKLVDSTDKADLRLIYLALAHMIKFRGHFLIEGDLNPDNSDVDKLFIQLVQTYNQLFEENPINASGVDAKAILSARLSKSRRLENLIAQLPGEKKNGLFGNLIALSLGLTPNFKSNFDLAEDAKLQLSKDTYDDDLDNLLAQIGDQYADLFLAAKNLSDAILLSDILRVNTEITKAPLSASMIKRYDEHHQDLTLLKALVRQQLPEKYKEIFFDQSKNGYAGYIDGGASQEEFYKFIKPILEKMDGTEELLVKLNREDLLRKQRTFDNGSIPHQIHLGELHAILRRQEDFYPFLKDNREKIEKILTFRIPYYVGPLARGNSRFAWMTRKSEETITPWNFEEVVDKGASAQSFIERMTNFDKNLPNEKVLPKHSLLYEYFTVYNELTKVKYVTEGMRKPAFLSGEQKKAIVDLLFKTNRKVTVKQLKEDYFKKIECFDSVEISGVEDRFNASLGTYHDLLKIIKDKDFLDNEENEDILEDIVLTLTLFEDREMIEERLKTYAHLFDDKVMKQLKRRRYTGWGRLSRKLINGIRDKQSGKTILDFLKSDGFANRNFMQLIHDDSLTFKEDIQKAQVSGQGDSLHEHIANLAGSPAIKKGILQTVKVVDELVKVMGRHKPENIVIEMARENQTTQKGQKNSRERMKRIEEGIKELGSQILKEHPVENTQLQNEKLYLYYLQNGRDMYVDQELDINRLSDYDVDHIVPQSFLKDDSIDNKVLTRSDKARGKSDNVPSEEVVKKMKNYWRQLLNAKLITQRKFDNLTKAERGGLSELDKAGFIKRQLVETRQITKHVAQILDSRMNTKYDENDKLIREVKVITLKSKLVSDFRKDFQFYKVREINNYHHAHDAYLNAVVGTALIKKYPKLESEFVYGDYKVYDVRKMIAKSEQEIGKATAKYFFYSNIMNFFKTEITLANGEIRKRPLIETNGETGEIVWDKGRDFATVRKVLSMPQVNIVKKTEVQTGGFSKESILPKRNSDKLIARKKDWDPKKYGGFDSPTVAYSVLVVAKVEKGKSKKLKSVKELLGITIMERSSFEKNPIDFLEAKGYKEVKKDLIIKLPKYSLFELENGRKRMLASAGELQKGNELALPSKYVNFLYLASHYEKLKGSPEDNEQKQLFVEQHKHYLDEIIEQISEFSKRVILADANLDKVLSAYNKHRDKPIREQAENIIHLFTLTNLGAPAAFKYFDTTIDRKRYTSTKEVLDATLIHQSITGLYETRIDLSQLGGDGGGSAGSAAGSGEFGGVPWILKKPLELTIKLDLEEQQGTLLNNSILSKKGKEELKQLFEKYSALWQSWENQVGHRRIRPHKIATGTVKPTPQKQYHINPKAKPDIQIVINDLLKQGVLIQKESTMNTPVYPVPKPNGRWRMVLDYRAVNKVTPLIAVQNQHSYGILGSLFKGRYKTTIDLSNGFWAHPIVPEDYWITAFTWQGKQYCWTVLPQGFLNSPGLFNGDVVDLLQGIPNVEVYVDDVYISHDSEKEHLEYLDILFNRLKEAGYIISLKKSNIANSIVDFLGFQITNEGRGLTDTFKEKLENITAPTTLKQLQSILGLLNFARNFIPDFTELIAPLYALIPKSPKNYVPWQIEHSTTLETLITKLNGAEYLQGRKGDKTLIMKVNASYTTGYIRYYNEGEKKPISYVSIVFSKTELKFTELEKLLTTVHKGLLKALDLSMGQNIHVYSPIVSMQNIQKTPQTAKKALASRWLSWLSYLEDPRIRFFYDPQMPALKDLPAVDTGKDNKKHPSNFQHIFYTDGSAITSPTKEGHLNAGMGIVYFINKDGNLQKQQEWSISLGNHTAQFAEIAAFEFALKKCLPLGGNILVVTDSNYVAKAYNEELDVWASNGFVNNRKKPLKHISKWKSVADLKRLRPDVVVTHEPGHQKLDSSPHAYGNNLADQLATQASFKVHAGKRTADGSEFEKRTADGSEFESPKKKAKVE

SEQ ID NO: 7711 - protein, 2096 aa, synthetic construct
MPAAKRVKLDGGDKKYSIGLDIGTNSVGWAVITDEYKVPSKKFKVLGNTDRHSIKKNLIGALLFDSGETAEATRLKRTARRRYTRRKNRICYLQEIFSNEMAKVDDSFFHRLEESFLVEEDKKHERHPIFGNIVDEVAYHEKYPTIYHLRKKLVDSTDKADLRLIYLALAHMIKFRGHFLIEGDLNPDNSDVDKLFIQLVQTYNQLFEENPINASGVDAKAILSARLSKSRRLENLIAQLPGEKKNGLFGNLIALSLGLTPNFKSNFDLAEDAKLQLSKDTYDDDLDNLLAQIGDQYADLFLAAKNLSDAILLSDILRVNTEITKAPLSASMIKRYDEHHQDLTLLKALVRQQLPEKYKEIFFDQSKNGYAGYIDGGASQEEFYKFIKPILEKMDGTEELLVKLNREDLLRKQRTFDNGSIPHQIHLGELHAILRRQEDFYPFLKDNREKIEKILTFRIPYYVGPLARGNSRFAWMTRKSEETITPWNFEEVVDKGASAQSFIERMTNFDKNLPNEKVLPKHSLLYEYFTVYNELTKVKYVTEGMRKPAFLSGEQKKAIVDLLFKTNRKVTVKQLKEDYFKKIECFDSVEISGVEDRFNASLGTYHDLLKIIKDKDFLDNEENEDILEDIVLTLTLFEDREMIEERLKTYAHLFDDKVMKQLKRRRYTGWGRLSRKLINGIRDKQSGKTILDFLKSDGFANRNFMQLIHDDSLTFKEDIQKAQVSGQGDSLHEHIANLAGSPAIKKGILQTVKVVDELVKVMGRHKPENIVIEMARENQTTQKGQKNSRERMKRIEEGIKELGSQILKEHPVENTQLQNEKLYLYYLQNGRDMYVDQELDINRLSDYDVDHIVPQSFLKDDSIDNKVLTRSDKARGKSDNVPSEEVVKKMKNYWRQLLNAKLITQRKFDNLTKAERGGLSELDKAGFIKRQLVETRQITKHVAQILDSRMNTKYDENDKLIREVKVITLKSKLVSDFRKDFQFYKVREINNYHHAHDAYLNAVVGTALIKKYPKLESEFVYGDYKVYDVRKMIAKSEQEIGKATAKYFFYSNIMNFFKTEITLANGEIRKRPLIETNGETGEIVWDKGRDFATVRKVLSMPQVNIVKKTEVQTGGFSKESILPKRNSDKLIARKKDWDPKKYGGFDSPTVAYSVLVVAKVEKGKSKKLKSVKELLGITIMERSSFEKNPIDFLEAKGYKEVKKDLIIKLPKYSLFELENGRKRMLASAGELQKGNELALPSKYVNFLYLASHYEKLKGSPEDNEQKQLFVEQHKHYLDEIIEQISEFSKRVILADANLDKVLSAYNKHRDKPIREQAENIIHLFTLTNLGAPAAFKYFDTTIDRKRYTSTKEVLDATLIHQSITGLYETRIDLSQLGGDGGGSAGSAAGSGEFGGTLQLEEEYRLFEPESTQKQEMDIWLKNFPQAWAETGGMGTAHCQAPVLIQLKATATPISIRQYPMPHEAYQGIKPHIRRMLDQGILKPCQSPWNTPLLPVKKPGTEDYRPVQDLREVNKRVEDIHPTVPNPYNLLSTLPPSHPWYTVLDLKDAFFCLRLHSESQLLFAFEWRDPEIGLSGQLTWTRLPQGFKNSPTLFNEALHSDLADFRVRYPALVLLQYVDDLLLAAATRTECLEGTKALLETLGNKGYRASAKKAQICLQEVTYLGYSLKDGQRWLTKARKEAILSIPVPKNSRQVREFLGKAGYCRLFIPGFAELAAPLYPLTRPGTLFQWGTEQQLAFEDIKKALLSSPALGLPDITKPFELFIDENSGFAKGVLVQKLGPWKRPVAYLSKKLDTVASGWPPCLRMVAAIAILVKDAGKLTLGQPLTILTSHPVEALVRQPPNKWLSNARMTHYQAMLLDAERVHFGPTVSLNPATLLPLPSGGNHHDCLQILAETHGTRPDLTDQPLPDADLTWYTDGSSFIRNGEREAGAAVTTESEVIWAAPLPPGTSAQRAELIALTQALKMAEGKKLTVYTDSRYAFATTHVHGEIYRRRGWLTSEGKEIKNKNEILALLEALFLPKRLSIIHCPGHQKGDSPQAKGNRLADDTAKKAATETHSSLTVLPAGKRTADGSEFEKRTADGSEFESPKKKAKVE

SEQ ID NO: 7712 - protein, 2095 aa, synthetic construct
MPAAKRVKLDGGDKKYSIGLDIGTNSVGWAVITDEYKVPSKKFKVLGNTDRHSIKKNLIGALLFDSGETAEATRLKRTARRRYTRRKNRICYLQEIFSNEMAKVDDSFFHRLEESFLVEEDKKHERHPIFGNIVDEVAYHEKYPTIYHLRKKLVDSTDKADLRLIYLALAHMIKFRGHFLIEGDLNPDNSDVDKLFIQLVQTYNQLFEENPINASGVDAKAILSARLSKSRRLENLIAQLPGEKKNGLFGNLIALSLGLTPNFKSNFDLAEDAKLQLSKDTYDDDLDNLLAQIGDQYADLFLAAKNLSDAILLSDILRVNTEITKAPLSASMIKRYDEHHQDLTLLKALVRQQLPEKYKEIFFDQSKNGYAGYIDGGASQEEFYKFIKPILEKMDGTEELLVKLNREDLLRKQRTFDNGSIPHQIHLGELHAILRRQEDFYPFLKDNREKIEKILTFRIPYYVGPLARGNSRFAWMTRKSEETITPWNFEEVVDKGASAQSFIERMTNFDKNLPNEKVLPKHSLLYEYFTVYNELTKVKYVTEGMRKPAFLSGEQKKAIVDLLFKTNRKVTVKQLKEDYFKKIECFDSVEISGVEDRFNASLGTYHDLLKIIKDKDFLDNEENEDILEDIVLTLTLFEDREMIEERLKTYAHLFDDKVMKQLKRRRYTGWGRLSRKLINGIRDKQSGKTILDFLKSDGFANRNFMQLIHDDSLTFKEDIQKAQVSGQGDSLHEHIANLAGSPAIKKGILQTVKVVDELVKVMGRHKPENIVIEMARENQTTQKGQKNSRERMKRIEEGIKELGSQILKEHPVENTQLQNEKLYLYYLQNGRDMYVDQELDINRLSDYDVDHIVPQSFLKDDSIDNKVLTRSDKARGKSDNVPSEEVVKKMKNYWRQLLNAKLITQRKFDNLTKAERGGLSELDKAGFIKRQLVETRQITKHVAQILDSRMNTKYDENDKLIREVKVITLKSKLVSDFRKDFQFYKVREINNYHHAHDAYLNAVVGTALIKKYPKLESEFVYGDYKVYDVRKMIAKSEQEIGKATAKYFFYSNIMNFFKTEITLANGEIRKRPLIETNGETGEIVWDKGRDFATVRKVLSMPQVNIVKKTEVQTGGFSKESILPKRNSDKLIARKKDWDPKKYGGFDSPTVAYSVLVVAKVEKGKSKKLKSVKELLGITIMERSSFEKNPIDFLEAKGYKEVKKDLIIKLPKYSLFELENGRKRMLASAGELQKGNELALPSKYVNFLYLASHYEKLKGSPEDNEQKQLFVEQHKHYLDEIIEQISEFSKRVILADANLDKVLSAYNKHRDKPIREQAENIIHLFTLTNLGAPAAFKYFDTTIDRKRYTSTKEVLDATLIHQSITGLYETRIDLSQLGGDGGGSAGSAAGSGEFGGVLNLEEEYRLHEKPVPSSIDPSWLQLFPTVWAERAGMGLANQVPPVVVELRSGASPVAVRQYPMSKEAREGIRPHIQKFLDLGVLVPCRSPWNTPLLPVKKPGTNDYRPVQDLREINKRVQDIHPTVPNPYNLLSSLPPSYTWYSVLDLKDAFFCLRLHPNSQPLFAFEWKDPEKGNTGQLTWTRLPQGFKNSPTLFNEALHRDLAPFRALNPQVVLLQYVDDLLVAAPTYEDCKKGTQKLLQELSKLGYRVSAKKAQLCQREVTYLGYLLKEGKRWLTPARKATVMKIPVPTTPRQVREFLGKAGFCRLFIPGFASLAAPLYPLTKPSIPFIWTEEHQQAFDHIKKALLSAPALALPDLTKPFTLYIDERAGVARGVLTQTLGPWRRPVAYLSKKLDPVASGWPTCLKAVAAVALLLKDADKLTLGQNVTVIASHSLESIVRQPPDRWMTNARMTHYQSLLLNERVSFAPPAVLNPATLLPVESEATPVHRCSEILAEETGTRRDLEDQPLPGVPTWYTDGSSFITEGKRRAGAPIVDGKRTVWASSLPEGTSAQKAELVALTQALRLAEGKNINIYTDSRYAFATAHIHGAIYKQRGWLTSAGKDIKNKEEILALLEAIHLPRRVAIIHCPGHQRGSNPVATGNRRADEAAKQAALSTRVLAGTTKPAGKRTADGSEFEKRTADGSEFESPKKKAKVE

SEQ ID NO: 7713 - protein, 2219 aa, synthetic construct
MPAAKRVKLDGGDKKYSIGLDIGTNSVGWAVITDEYKVPSKKFKVLGNTDRHSIKKNLIGALLFDSGETAEATRLKRTARRRYTRRKNRICYLQEIFSNEMAKVDDSFFHRLEESFLVEEDKKHERHPIFGNIVDEVAYHEKYPTIYHLRKKLVDSTDKADLRLIYLALAHMIKFRGHFLIEGDLNPDNSDVDKLFIQLVQTYNQLFEENPINASGVDAKAILSARLSKSRRLENLIAQLPGEKKNGLFGNLIALSLGLTPNFKSNFDLAEDAKLQLSKDTYDDDLDNLLAQIGDQYADLFLAAKNLSDAILLSDILRVNTEITKAPLSASMIKRYDEHHQDLTLLKALVRQQLPEKYKEIFFDQSKNGYAGYIDGGASQEEFYKFIKPILEKMDGTEELLVKLNREDLLRKQRTFDNGSIPHQIHLGELHAILRRQEDFYPFLKDNREKIEKILTFRIPYYVGPLARGNSRFAWMTRKSEETITPWNFEEVVDKGASAQSFIERMTNFDKNLPNEKVLPKHSLLYEYFTVYNELTKVKYVTEGMRKPAFLSGEQKKAIVDLLFKTNRKVTVKQLKEDYFKKIECFDSVEISGVEDRFNASLGTYHDLLKIIKDKDFLDNEENEDILEDIVLTLTLFEDREMIEERLKTYAHLFDDKVMKQLKRRRYTGWGRLSRKLINGIRDKQSGKTILDFLKSDGFANRNFMQLIHDDSLTFKEDIQKAQVSGQGDSLHEHIANLAGSPAIKKGILQTVKVVDELVKVMGRHKPENIVIEMARENQTTQKGQKNSRERMKRIEEGIKELGSQILKEHPVENTQLQNEKLYLYYLQNGRDMYVDQELDINRLSDYDVDHIVPQSFLKDDSIDNKVLTRSDKARGKSDNVPSEEVVKKMKNYWRQLLNAKLITQRKFDNLTKAERGGLSELDKAGFIKRQLVETRQITKHVAQILDSRMNTKYDENDKLIREVKVITLKSKLVSDFRKDFQFYKVREINNYHHAHDAYLNAVVGTALIKKYPKLESEFVYGDYKVYDVRKMIAKSEQEIGKATAKYFFYSNIMNFFKTEITLANGEIRKRPLIETNGETGEIVWDKGRDFATVRKVLSMPQVNIVKKTEVQTGGFSKESILPKRNSDKLIARKKDWDPKKYGGFDSPTVAYSVLVVAKVEKGKSKKLKSVKELLGITIMERSSFEKNPIDFLEAKGYKEVKKDLIIKLPKYSLFELENGRKRMLASAGELQKGNELALPSKYVNFLYLASHYEKLKGSPEDNEQKQLFVEQHKHYLDEIIEQISEFSKRVILADANLDKVLSAYNKHRDKPIREQAENIIHLFTLTNLGAPAAFKYFDTTIDRKRYTSTKEVLDATLIHQSITGLYETRIDLSQLGGDGGGSAGSAAGSGEFGGTLGDQGSRGSDPLPEPRVTLTVEGIPTEFLVNTGAEHSVLTKPMGKMGSKRTVVAGATGSKVYPWTTKRLLKIGQKQVTHSFLVIPECPAPLLGRDLLTKLKAQIQFSTEGPQVTWEDRPAMCLVLNLEEEYRLHEKPVPPSIDPSWLQLFPMVWAEKAGMGLANQVPPVVVELKSDASPVAVRQYPMSKEAREGIRPHIQRFLDLGILVPCQSPWNTPLLPVKKPGTNDYRPVQDLREVNKRVQDIHPTVPNPYNLLSSLPPSHTWYSVLDLKDAFFCLKLHPNSQPLFAFEWRDPEKGNTGQLTWTRLPQGFKNSPTLFDEALHRDLASFRALNPQVVMLQYVDDLLVAAPTYRDCKEGTRRLLQELSKLGYRVSAKKAQLCREEVTYLGYLLKGGKRWLTPARKATVMKIPTPTTPRQVREFLGTAGFCRLWIPGFASLAAPLYPLTREKVPFTWTEAHQEAFGRIKEALLSAPALALPDLTKPFALYVDEKEGVARGVLTQTLGPWRRPVAYLSKKLDPVASGWPTCLKAIAAVALLLKDADKLTLGQNVLVIAPHNLESIVRQPPDRWMTNARMTHYQSLLLNERVSFAPPAILNPATLLPVESDDTPIHICSEILAEETGTRPDLRDQPLPGVPAWYTDGSSFIMDGRRQAGAAIVDNKRTVWASNLPEGTSAQKAELIALTQALRLAEGKSINIYTDSRYAFATAHVHGAIYKQRGLLTSAGKDIKNKEEILALLEAIHLPKRVAIIHCPGHQRGTDPVATGNRKADEAAKQAAQSTRILTETTKNAGKRTADGSEFEKRTADGSEFESPKKKAKVE

SEQ ID NO: 7714 - protein, 2128 aa, synthetic construct
MPAAKRVKLDGGDKKYSIGLDIGTNSVGWAVITDEYKVPSKKFKVLGNTDRHSIKKNLIGALLFDSGETAEATRLKRTARRRYTRRKNRICYLQEIFSNEMAKVDDSFFHRLEESFLVEEDKKHERHPIFGNIVDEVAYHEKYPTIYHLRKKLVDSTDKADLRLIYLALAHMIKFRGHFLIEGDLNPDNSDVDKLFIQLVQTYNQLFEENPINASGVDAKAILSARLSKSRRLENLIAQLPGEKKNGLFGNLIALSLGLTPNFKSNFDLAEDAKLQLSKDTYDDDLDNLLAQIGDQYADLFLAAKNLSDAILLSDILRVNTEITKAPLSASMIKRYDEHHQDLTLLKALVRQQLPEKYKEIFFDQSKNGYAGYIDGGASQEEFYKFIKPILEKMDGTEELLVKLNREDLLRKQRTFDNGSIPHQIHLGELHAILRRQEDFYPFLKDNREKIEKILTFRIPYYVGPLARGNSRFAWMTRKSEETITPWNFEEVVDKGASAQSFIERMTNFDKNLPNEKVLPKHSLLYEYFTVYNELTKVKYVTEGMRKPAFLSGEQKKAIVDLLFKTNRKVTVKQLKEDYFKKIECFDSVEISGVEDRFNASLGTYHDLLKIIKDKDFLDNEENEDILEDIVLTLTLFEDREMIEERLKTYAHLFDDKVMKQLKRRRYTGWGRLSRKLINGIRDKQSGKTILDFLKSDGFANRNFMQLIHDDSLTFKEDIQKAQVSGQGDSLHEHIANLAGSPAIKKGILQTVKVVDELVKVMGRHKPENIVIEMARENQTTQKGQKNSRERMKRIEEGIKELGSQILKEHPVENTQLQNEKLYLYYLQNGRDMYVDQELDINRLSDYDVDHIVPQSFLKDDSIDNKVLTRSDKARGKSDNVPSEEVVKKMKNYWRQLLNAKLITQRKFDNLTKAERGGLSELDKAGFIKRQLVETRQITKHVAQILDSRMNTKYDENDKLIREVKVITLKSKLVSDFRKDFQFYKVREINNYHHAHDAYLNAVVGTALIKKYPKLESEFVYGDYKVYDVRKMIAKSEQEIGKATAKYFFYSNIMNFFKTEITLANGEIRKRPLIETNGETGEIVWDKGRDFATVRKVLSMPQVNIVKKTEVQTGGFSKESILPKRNSDKLIARKKDWDPKKYGGFDSPTVAYSVLVVAKVEKGKSKKLKSVKELLGITIMERSSFEKNPIDFLEAKGYKEVKKDLIIKLPKYSLFELENGRKRMLASAGELQKGNELALPSKYVNFLYLASHYEKLKGSPEDNEQKQLFVEQHKHYLDEIIEQISEFSKRVILADANLDKVLSAYNKHRDKPIREQAENIIHLFTLTNLGAPAAFKYFDTTIDRKRYTSTKEVLDATLIHQSITGLYETRIDLSQLGGDGGGSAGSAAGSGEFGGLLGRDLLTKLKAQIQFSTEGPQVTWEDRPAMCLVLNLEEEYRLHEKPVPPSIDPSWLQLFPMVWAEKAGMGLANQVPPVVVELKSDASPVAVRQYPMSKEAREGIRPHIQRFLDLGILVPCQSPWNTPLLPVKKPGTNDYRPVQDLREVNKRVQDIHPTVPNPYNLLSSLPPSHTWYSVLDLKDAFFCLKLHPNSQPLFAFEWRDPEKGNTGQLTWTRLPQGFKNSPTLFNEALHRDLASFRALNPQVVMLQYVDDLLVAAPTYRDCKEGTRRLLQELSKLGYRVSAKKAQLCREEVTYLGYLLKGGKRWLTPARKATVMKIPTPTTPRQVREFLGTAGFCRLWIPGFASLAAPLYPLTRPKVPFTWTEAHQEAFGRIKEALLSAPALALPDLTKPFALYVDEKEGVARGVLTQTLGPWRRPVAYLSKKLDPVASGWPTCLKAIAAVALLLKDADKLTLGQNVLVIAPHNLESIVRQPPDRWMTNARMTHYQSLLLNERVSFAPPAILNPATLLPVESDDTPIHICSEILAEETGTRPDLRDQPLPGVPAWYTDGSSFIMDGRRQAGAAIVDNKRTVWASNLPEGTSAQKAELIALTQALRLAEGKSINIYTDSRYAFATAHVHGAIYKQRGWLTSAGKDIKNKEEILALLEAIHLPKRVAIIHCPGHQRGTDPVATGNRKADEAAKQAAQSTRILTETTKNAGKRTADGSEFEKRTADGSEFESPKKKAKVE

SEQ ID NO: 7715 - protein, 2219 aa, synthetic construct
MPAAKRVKLDGGDKKYSIGLDIGTNSVGWAVITDEYKVPSKKFKVLGNTDRHSIKKNLIGALLFDSGETAEATRLKRTARRRYTRRKNRICYLQEIFSNEMAKVDDSFFHRLEESFLVEEDKKHERHPIFGNIVDEVAYHEKYPTIYHLRKKLVDSTDKADLRLIYLALAHMIKFRGHFLIEGDLNPDNSDVDKLFIQLVQTYNQLFEENPINASGVDAKAILSARLSKSRRLENLIAQLPGEKKNGLFGNLIALSLGLTPNFKSNFDLAEDAKLQLSKDTYDDDLDNLLAQIGDQYADLFLAAKNLSDAILLSDILRVNTEITKAPLSASMIKRYDEHHQDLTLLKALVRQQLPEKYKEIFFDQSKNGYAGYIDGGASQEEFYKFIKPILEKMDGTEELLVKLNREDLLRKQRTFDNGSIPHQIHLGELHAILRRQEDFYPFLKDNREKIEKILTFRIPYYVGPLARGNSRFAWMTRKSEETITPWNFEEVVDKGASAQSFIERMTNFDKNLPNEKVLPKHSLLYEYFTVYNELTKVKYVTEGMRKPAFLSGEQKKAIVDLLFKTNRKVTVKQLKEDYFKKIECFDSVEISGVEDRFNASLGTYHDLLKIIKDKDFLDNEENEDILEDIVLTLTLFEDREMIEERLKTYAHLFDDKVMKQLKRRRYTGWGRLSRKLINGIRDKQSGKTILDFLKSDGFANRNFMQLIHDDSLTFKEDIQKAQVSGQGDSLHEHIANLAGSPAIKKGILQTVKVVDELVKVMGRHKPENIVIEMARENQTTQKGQKNSRERMKRIEEGIKELGSQILKEHPVENTQLQNEKLYLYYLQNGRDMYVDQELDINRLSDYDVDHIVPQSFLKDDSIDNKVLTRSDKARGKSDNVPSEEVVKKMKNYWRQLLNAKLITQRKFDNLTKAERGGLSELDKAGFIKRQLVETRQITKHVAQILDSRMNTKYDENDKLIREVKVITLKSKLVSDFRKDFQFYKVREINNYHHAHDAYLNAVVGTALIKKYPKLESEFVYGDYKVYDVRKMIAKSEQEIGKATAKYFFYSNIMNFFKTEITLANGEIRKRPLIETNGETGEIVWDKGRDFATVRKVLSMPQVNIVKKTEVQTGGFSKESILPKRNSDKLIARKKDWDPKKYGGFDSPTVAYSVLVVAKVEKGKSKKLKSVKELLGITIMERSSFEKNPIDFLEAKGYKEVKKDLIIKLPKYSLFELENGRKRMLASAGELQKGNELALPSKYVNFLYLASHYEKLKGSPEDNEQKQLFVEQHKHYLDEIIEQISEFSKRVILADANLDKVLSAYNKHRDKPIREQAENIIHLFTLTNLGAPAAFKYFDTTIDRKRYTSTKEVLDATLIHQSITGLYETRIDLSQLGGDGGGSAGSAAGSGEFGGTLGDQGSRGSDPLPEPRVTLTVEGIPTEFLVNTGAEHSVLTKPMGKMGSKRTVVAGATGSKVYPWTTKRLLKIGQKQVTHSFLVIPECPAPLLGRDLLTKLKAQIQFSTEGPQVTWEDRPAMCLVLNLEEEYRLHEKPVPPSIDPSWLQLFPMVWAEKAGMGLANQVPPVVVELKSDASPVAVRQYPMSKEAREGIRPHIQRFLDLGILVPCQSPWNTPLLPVKKPGTNDYRPVQDLREVNKRVQDIHPTVPNPYNLLSSLPPSHTWYSVLDLKDAFFCLKLHPNSQPLFAFEWRDPEKGNTGQLTWTRLPQGFKNSPTLFNEALHRDLASFRALNPQVVMLQYVDDLLVAAPTYRDCKEGTRRLLQELSKLGYRVSAKKAQLCREEVTYLGYLLKGGKRWLTPARKATVMKIPTPTTPRQVREFLGTAGFCRLWIPGFASLAAPLYPLTRPKVPFTWTEAHQEAFGRIKEALLSAPALALPDLTKPFALYVDEKEGVARGVLTQTLGPWRRPVAYLSKKLDPVASGWPTCLKAIAAVALLLKDADKLTLGQNVLVIAPHNLESIVRQPPDRWMTNARMTHYQSLLLNERVSFAPPAILNPATLLPVESDDTPIHICSEILAEETGTRPDLRDQPLPGVPAWYTDGSSFIMDGRRQAGAAIVDNKRTVWASNLPEGTSAQKAELIALTQALRLAEGKSINIYTDSRYAFATAHVHGAIYKQRGWLTSAGKDIKNKEEILALLEAIHLPKRVAIIHCPGHQRGTDPVATGNRKADEAAKQAAQSTRILTETTKNAGKRTADGSEFEKRTADGSEFESPKKKAKVE

SEQ ID NO: 7716 - protein, 2097 aa, synthetic construct
MPAAKRVKLDGGDKKYSIGLDIGTNSVGWAVITDEYKVPSKKFKVLGNTDRHSIKKNLIGALLFDSGETAEATRLKRTARRRYTRRKNRICYLQEIFSNEMAKVDDSFFHRLEESFLVEEDKKHERHPIFGNIVDEVAYHEKYPTIYHLRKKLVDSTDKADLRLIYLALAHMIKFRGHFLIEGDLNPDNSDVDKLFIQLVQTYNQLFEENPINASGVDAKAILSARLSKSRRLENLIAQLPGEKKNGLFGNLIALSLGLTPNFKSNFDLAEDAKLQLSKDTYDDDLDNLLAQIGDQYADLFLAAKNLSDAILLSDILRVNTEITKAPLSASMIKRYDEHHQDLTLLKALVRQQLPEKYKEIFFDQSKNGYAGYIDGGASQEEFYKFIKPILEKMDGTEELLVKLNREDLLRKQRTFDNGSIPHQIHLGELHAILRRQEDFYPFLKDNREKIEKILTFRIPYYVGPLARGNSRFAWMTRKSEETITPWNFEEVVDKGASAQSFIERMTNFDKNLPNEKVLPKHSLLYEYFTVYNELTKVKYVTEGMRKPAFLSGEQKKAIVDLLFKTNRKVTVKQLKEDYFKKIECFDSVEISGVEDRFNASLGTYHDLLKIIKDKDFLDNEENEDILEDIVLTLTLFEDREMIEERLKTYAHLFDDKVMKQLKRRRYTGWGRLSRKLINGIRDKQSGKTILDFLKSDGFANRNFMQLIHDDSLTFKEDIQKAQVSGQGDSLHEHIANLAGSPAIKKGILQTVKVVDELVKVMGRHKPENIVIEMARENQTTQKGQKNSRERMKRIEEGIKELGSQILKEHPVENTQLQNEKLYLYYLQNGRDMYVDQELDINRLSDYDVDHIVPQSFLKDDSIDNKVLTRSDKARGKSDNVPSEEVVKKMKNYWRQLLNAKLITQRKFDNLTKAERGGLSELDKAGFIKRQLVETRQITKHVAQILDSRMNTKYDENDKLIREVKVITLKSKLVSDFRKDFQFYKVREINNYHHAHDAYLNAVVGTALIKKYPKLESEFVYGDYKVYDVRKMIAKSEQEIGKATAKYFFYSNIMNFFKTEITLANGEIRKRPLIETNGETGEIVWDKGRDFATVRKVLSMPQVNIVKKTEVQTGGFSKESILPKRNSDKLIARKKDWDPKKYGGFDSPTVAYSVLVVAKVEKGKSKKLKSVKELLGITIMERSSFEKNPIDFLEAKGYKEVKKDLIIKLPKYSLFELENGRKRMLASAGELQKGNELALPSKYVNFLYLASHYEKLKGSPEDNEQKQLFVEQHKHYLDEIIEQISEFSKRVILADANLDKVLSAYNKHRDKPIREQAENIIHLFTLTNLGAPAAFKYFDTTIDRKRYTSTKEVLDATLIHQSITGLYETRIDLSQLGGDGGGSAGSAAGSGEFGGTLNLEDEYRLYETSAEPEVSPGSTWLSDFPQAWAETGGMGLAVRQAPLIIPLKATSTPVSIKQYPMSQEAKLGIKPHIQRLLDQGILVPCQSPWNTPLLPVKKPGTNDYRPVQDLREVNKRVEDIHPTVPNPYNLLSGLPPSHRWYTVLDLKDAFFCLRLHPTSQPLFAFEWRDPGMGISGQLTWTRLPQGFKNSPTLFNEALHRDLADFRIQHPDLILLQYVDDILLAATSELDCQQGTRALLLTLGNLGYRASAKKAQLCQKQVKYLGYLLKEGQRWLTEARKETVMGQPTPKTPRQLREFLGTAGFCRLWIPGFAEMAAPLYPLTKPGTLFNWGPDQQKAYQEIKQALLTAPALGLPDLTKPFELFVDEKQGYAKGVLTQKLGPWRRPVAYLSKKLDPVAAGWPPCLRMVAAIAVLRKDAGKLTMGQPLVILAPHAVEALVKQPPDRWLSNARMTHYQAMLLDTDRVQFGPVVALNPATLLPLPEEGAPHDCLEILAETHGTRPDLTDQPIPDADHTWYTDGSSFLQEGQRKAGAAVTTETEVIWARALPAGTSAQRAELIALTQALKMAEGKRLNVYTDSRYAFATAHIHGEIYRRRGWLTSEGREIKNKSEILALLKALFLPKRLSIIHCLGHQKGDSAEARGNRLADQAAREAAIKTPPDTSTLLAGKRTADGSEFEKRTADGSEFESPKKKAKVE

SEQ ID NO: 7717 - protein, 2097 aa, synthetic construct
MPAAKRVKLDGGDKKYSIGLDIGTNSVGWAVITDEYKVPSKKFKVLGNTDRHSIKKNLIGALLFDSGETAEATRLKRTARRRYTRRKNRICYLQEIFSNEMAKVDDSFFHRLEESFLVEEDKKHERHPIFGNIVDEVAYHEKYPTIYHLRKKLVDSTDKADLRLIYLALAHMIKFRGHFLIEGDLNPDNSDVDKLFIQLVQTYNQLFEENPINASGVDAKAILSARLSKSRRLENLIAQLPGEKKNGLFGNLIALSLGLTPNFKSNFDLAEDAKLQLSKDTYDDDLDNLLAQIGDQYADLFLAAKNLSDAILLSDILRVNTEITKAPLSASMIKRYDEHHQDLTLLKALVRQQLPEKYKEIFFDQSKNGYAGYIDGGASQEEFYKFIKPILEKMDGTEELLVKLNREDLLRKQRTFDNGSIPHQIHLGELHAILRRQEDFYPFLKDNREKIEKILTFRIPYYVGPLARGNSRFAWMTRKSEETITPWNFEEVVDKGASAQSFIERMTNFDKNLPNEKVLPKHSLLYEYFTVYNELTKVKYVTEGMRKPAFLSGEQKKAIVDLLFKTNRKVTVKQLKEDYFKKIECFDSVEISGVEDRFNASLGTYHDLLKIIKDKDFLDNEENEDILEDIVLTLTLFEDREMIEERLKTYAHLFDDKVMKQLKRRRYTGWGRLSRKLINGIRDKQSGKTILDFLKSDGFANRNFMQLIHDDSLTFKEDIQKAQVSGQGDSLHEHIANLAGSPAIKKGILQTVKVVDELVKVMGRHKPENIVIEMARENQTTQKGQKNSRERMKRIEEGIKELGSQILKEHPVENTQLQNEKLYLYYLQNGRDMYVDQELDINRLSDYDVDHIVPQSFLKDDSIDNKVLTRSDKARGKSDNVPSEEVVKKMKNYWRQLLNAKLITQRKFDNLTKAERGGLSELDKAGFIKRQLVETRQITKHVAQILDSRMNTKYDENDKLIREVKVITLKSKLVSDFRKDFQFYKVREINNYHHAHDAYLNAVVGTALIKKYPKLESEFVYGDYKVYDVRKMIAKSEQEIGKATAKYFFYSNIMNFFKTEITLANGEIRKRPLIETNGETGEIVWDKGRDFATVRKVLSMPQVNIVKKTEVQTGGFSKESILPKRNSDKLIARKKDWDPKKYGGFDSPTVAYSVLVVAKVEKGKSKKLKSVKELLGITIMERSSFEKNPIDFLEAKGYKEVKKDLIIKLPKYSLFELENGRKRMLASAGELQKGNELALPSKYVNFLYLASHYEKLKGSPEDNEQKQLFVEQHKHYLDEIIEQISEFSKRVILADANLDKVLSAYNKHRDKPIREQAENIIHLFTLTNLGAPAAFKYFDTTIDRKRYTSTKEVLDATLIHQSITGLYETRIDLSQLGGDGGGSAGSAAGSGEFGGTLNIEDEHRLHETSKEPDVSLGSTWLSDFPQAWAETGGMGLAVRQAPLIIPLKATSTPVSIKQYPMSQEARLGIKPHIQRLLDQGILVPCQSPWNTPLLPVKKPGTNDYRPVQDLREVNKRVEDIHPTVPNPYNLLSGLPPSHQWYTVLDLKDAFFCLRLHPTSQPLFAFEWRDPEMGISGQLTWTRLPQGFKNSPTLFDEALHRDLADFRIQHPDLILLQYVDDLLLAATSELDCQQGTRALLQTLGNLGYRASAKKAQICQKQVKYLGYLLKEGQRWLTEARKETVMGQPTPKTPRQLREFLGTAGFCRLWIPGFAEMAAPLYPLTKTGTLFNWGPDQQKAYQEIKQALLTAPALGLPDLTKPFELFVDEKQGYAKGVLTQKLGPWRRPVAYLSKKLDPVAAGWPPCLRMVAAIAVLTKDAGKLTMGQPLVILAPHAVEALVKQPPDRWLSNARMTHYQALLLDTDRVQFGPVVALNPATLLPLPEEGLQHNCLDILAEAHGTRPDLTDQPLPDADHTWYTDGSSLLQEGQRKAGAAVTTETEVIWAKALPAGTSAQRAELIALTQALKMAEGKKLNVYTDSRYAFATAHIHGEIYRRRGLLTSEGKEIKNKDEILALLKALFLPKRLSIIHCPGHQKGHSAEARGNRMADQAARKAAITETPDTSTLLAGKRTADGSEFEKRTADGSEFESPKKKAKVE

SEQ ID NO: 7718 - protein, 2177 aa, synthetic construct
MPAAKRVKLDGGDKKYSIGLDIGTNSVGWAVITDEYKVPSKKFKVLGNTDRHSIKKNLIGALLFDSGETAEATRLKRTARRRYTRRKNRICYLQEIFSNEMAKVDDSFFHRLEESFLVEEDKKHERHPIFGNIVDEVAYHEKYPTIYHLRKKLVDSTDKADLRLIYLALAHMIKFRGHFLIEGDLNPDNSDVDKLFIQLVQTYNQLFEENPINASGVDAKAILSARLSKSRRLENLIAQLPGEKKNGLFGNLIALSLGLTPNFKSNFDLAEDAKLQLSKDTYDDDLDNLLAQIGDQYADLFLAAKNLSDAILLSDILRVNTEITKAPLSASMIKRYDEHHQDLTLLKALVRQQLPEKYKEIFFDQSKNGYAGYIDGGASQEEFYKFIKPILEKMDGTEELLVKLNREDLLRKQRTFDNGSIPHQIHLGELHAILRRQEDFYPFLKDNREKIEKILTFRIPYYVGPLARGNSRFAWMTRKSEETITPWNFEEVVDKGASAQSFIERMTNFDKNLPNEKVLPKHSLLYEYFTVYNELTKVKYVTEGMRKPAFLSGEQKKAIVDLLFKTNRKVTVKQLKEDYFKKIECFDSVEISGVEDRFNASLGTYHDLLKIIKDKDFLDNEENEDILEDIVLTLTLFEDREMIEERLKTYAHLFDDKVMKQLKRRRYTGWGRLSRKLINGIRDKQSGKTILDFLKSDGFANRNFMQLIHDDSLTFKEDIQKAQVSGQGDSLHEHIANLAGSPAIKKGILQTVKVVDELVKVMGRHKPENIVIEMARENQTTQKGQKNSRERMKRIEEGIKELGSQILKEHPVENTQLQNEKLYLYYLQNGRDMYVDQELDINRLSDYDVDHIVPQSFLKDDSIDNKVLTRSDKARGKSDNVPSEEVVKKMKNYWRQLLNAKLITQRKFDNLTKAERGGLSELDKAGFIKRQLVETRQITKHVAQILDSRMNTKYDENDKLIREVKVITLKSKLVSDFRKDFQFYKVREINNYHHAHDAYLNAVVGTALIKKYPKLESEFVYGDYKVYDVRKMIAKSEQEIGKATAKYFFYSNIMNFFKTEITLANGEIRKRPLIETNGETGEIVWDKGRDFATVRKVLSMPQVNIVKKTEVQTGGFSKESILPKRNSDKLIARKKDWDPKKYGGFDSPTVAYSVLVVAKVEKGKSKKLKSVKELLGITIMERSSFEKNPIDFLEAKGYKEVKKDLIIKLPKYSLFELENGRKRMLASAGELQKGNELALPSKYVNFLYLASHYEKLKGSPEDNEQKQLFVEQHKHYLDEIIEQISEFSKRVILADANLDKVLSAYNKHRDKPIREQAENIIHLFTLTNLGAPAAFKYFDTTIDRKRYTSTKEVLDATLIHQSITGLYETRIDLSQLGGDGGGSAGSAAGSGEFGGMDPLQLLQPLEAEIKGTKLKAHWNSGATITCVPQAFLEEEVPIKNIWIKTIHGEKEQPVYYLTFKIQGRKVEAEVISSPYDYILVSPSDIPWLMKKPLQLTTLVPLQEYEERLLKQTMLTGSYKEKLQSLFLKYDALWQHWENQVGHRRIKPHHIATGTVNPRPQKQYPINPKAKASIQTVINDLLKQGVLIQQNSIMNTPVYPVPKPDGKWRMVLDYREVNKTIPLIAAQNQHSAGILSSIFRGKYKTTLDLSNGFWAHSITPESYWLTAFTWLGQQYCWTRLPQGFLNSPALFNADVVDLLKEVPNVQVYVDDIYISHDDPREHLEQLEKVFSLLLNAGYVVSLKKSEIAQHEVEFLGFNITKEGRGLTETFKQKLLNITPPRDLKQLQSILGLLNFARNFIPNFSELVKPLYNIIATAPGKYITWTTDNSQQLQNIISMLNSAENLEERNPEVRLIMKVNTSPSAGYIRFYNEFAKRPIMYLNYVYTKAEVKFTNTEKLLTTIHKGLIKALDLGMGQEILVYSPIVSMTKIQKTPLPERKALPIRWITWMSYLEDPRIQFHYDKTLPELQQVPTVTDDIIAKIKHPSEFSMVFYTDGSAIKHPNVNKSHNAGMGIAQVQFKPEFTVINTWSIPLGDHTAQLAEVAAVEFACKKALKIDGPVLIVTDSFYVAESVNKELPYWQSNGFFNNKKKPLKHVSKWKSIADCIQLKPDIIIIHEKGHQPTASTFHTEGNNLADKLATQGSYVVNAGKRTADGSEFEKRTADGSEFESPKKKAKVE

SEQ ID NO: 7719 - protein, 2097 aa, synthetic construct
MPAAKRVKLDGGDKKYSIGLDIGTNSVGWAVITDEYKVPSKKFKVLGNTDRHSIKKNLIGALLFDSGETAEATRLKRTARRRYTRRKNRICYLQEIFSNEMAKVDDSFFHRLEESFLVEEDKKHERHPIFGNIVDEVAYHEKYPTIYHLRKKLVDSTDKADLRLIYLALAHMIKFRGHFLIEGDLNPDNSDVDKLFIQLVQTYNQLFEENPINASGVDAKAILSARLSKSRRLENLIAQLPGEKKNGLFGNLIALSLGLTPNFKSNFDLAEDAKLQLSKDTYDDDLDNLLAQIGDQYADLFLAAKNLSDAILLSDILRVNTEITKAPLSASMIKRYDEHHQDLTLLKALVRQQLPEKYKEIFFDQSKNGYAGYIDGGASQEEFYKFIKPILEKMDGTEELLVKLNREDLLRKQRTFDNGSIPHQIHLGELHAILRRQEDFYPFLKDNREKIEKILTFRIPYYVGPLARGNSRFAWMTRKSEETITPWNFEEVVDKGASAQSFIERMTNFDKNLPNEKVLPKHSLLYEYFTVYNELTKVKYVTEGMRKPAFLSGEQKKAIVDLLFKTNRKVTVKQLKEDYFKKIECFDSVEISGVEDRFNASLGTYHDLLKIIKDKDFLDNEENEDILEDIVLTLTLFEDREMIEERLKTYAHLFDDKVMKQLKRRRYTGWGRLSRKLINGIRDKQSGKTILDFLKSDGFANRNFMQLIHDDSLTFKEDIQKAQVSGQGDSLHEHIANLAGSPAIKKGILQTVKVVDELVKVMGRHKPENIVIEMARENQTTQKGQKNSRERMKRIEEGIKELGSQILKEHPVENTQLQNEKLYLYYLQNGRDMYVDQELDINRLSDYDVDHIVPQSFLKDDSIDNKVLTRSDKARGKSDNVPSEEVVKKMKNYWRQLLNAKLITQRKFDNLTKAERGGLSELDKAGFIKRQLVETRQITKHVAQILDSRMNTKYDENDKLIREVKVITLKSKLVSDFRKDFQFYKVREINNYHHAHDAYLNAVVGTALIKKYPKLESEFVYGDYKVYDVRKMIAKSEQEIGKATAKYFFYSNIMNFFKTEITLANGEIRKRPLIETNGETGEIVWDKGRDFATVRKVLSMPQVNIVKKTEVQTGGFSKESILPKRNSDKLIARKKDWDPKKYGGFDSPTVAYSVLVVAKVEKGKSKKLKSVKELLGITIMERSSFEKNPIDFLEAKGYKEVKKDLIIKLPKYSLFELENGRKRMLASAGELQKGNELALPSKYVNFLYLASHYEKLKGSPEDNEQKQLFVEQHKHYLDEIIEQISEFSKRVILADANLDKVLSAYNKHRDKPIREQAENIIHLFTLTNLGAPAAFKYFDTTIDRKRYTSTKEVLDATLIHQSITGLYETRIDLSQLGGDGGGSAGSAAGSGEFGGTLNIEDEYRLHETSKEPDVPLGSTWLSDFPQAWAETGGMGLAVRQAPLIIPLKATSTPVSIKQYPMSQEARLGIKPHIQRLLDQGILVPCQSPWNTPLLPVKKPGTNDYRPVQDLREVNKRVEDIHPTVPNPYNLLSGLPPSHQWYTVLDLKDAFFCLRLHPTSQPLFAFEWRDPEMGISGQLTWTRLPQGFKNSPTLFNEALHRDLADFRIQHPDLILLQYVDDLLLAATSEQDCQRGTRALLQTLGNLGYRASAKKAQICQKQVKYLGYLLKEGQRWLTEARKETVMGQPTPKTPRQLREFLGTAGFCRLWIPGFAEMAAPLYPLTKPGTLFNWGPDQQKAYQEIKQALLTAPALGLPDLTKPFELFVDEKQGYAKGVLTQKLGPWRRPVAYLSKKLDPVAAGWPPCLRMVAAIAVLTKDAGKLTMGQPLVILAPHAVEALVKQPPDRWLSNARMTHYQAMLLDTDRVQFGPVVALNPATLLPLPEKEAPHDCLEILAETHGTRPDLTDQPIPDADYTWYTDGSSFLQEGQRRAGAAVTTETEVIWARALPAGTSAQRAELIALTQALKMAEGKKLNVYTDSRYAFATAHVHGEIYRRRGWLTSEGREIKNKNEILALLKALFLPKRLSIIHCPGHQKGNSAEARGNRMADQAAREAAMKAVLETSTLLAGKRTADGSEFEKRTADGSEFESPKKKAKVE

SEQ ID NO: 7720 - protein, 2120 aa, synthetic construct
MPAAKRVKLDGGDKKYSIGLDIGTNSVGWAVITDEYKVPSKKFKVLGNTDRHSIKKNLIGALLFDSGETAEATRLKRTARRRYTRRKNRICYLQEIFSNEMAKVDDSFFHRLEESFLVEEDKKHERHPIFGNIVDEVAYHEKYPTIYHLRKKLVDSTDKADLRLIYLALAHMIKFRGHFLIEGDLNPDNSDVDKLFIQLVQTYNQLFEENPINASGVDAKAILSARLSKSRRLENLIAQLPGEKKNGLFGNLIALSLGLTPNFKSNFDLAEDAKLQLSKDTYDDDLDNLLAQIGDQYADLFLAAKNLSDAILLSDILRVNTEITKAPLSASMIKRYDEHHQDLTLLKALVRQQLPEKYKEIFFDQSKNGYAGYIDGGASQEEFYKFIKPILEKMDGTEELLVKLNREDLLRKQRTFDNGSIPHQIHLGELHAILRRQEDFYPFLKDNREKIEKILTFRIPYYVGPLARGNSRFAWMTRKSEETITPWNFEEVVDKGASAQSFIERMTNFDKNLPNEKVLPKHSLLYEYFTVYNELTKVKYVTEGMRKPAFLSGEQKKAIVDLLFKTNRKVTVKQLKEDYFKKIECFDSVEISGVEDRFNASLGTYHDLLKIIKDKDFLDNEENEDILEDIVLTLTLFEDREMIEERLKTYAHLFDDKVMKQLKRRRYTGWGRLSRKLINGIRDKQSGKTILDFLKSDGFANRNFMQLIHDDSLTFKEDIQKAQVSGQGDSLHEHIANLAGSPAIKKGILQTVKVVDELVKVMGRHKPENIVIEMARENQTTQKGQKNSRERMKRIEEGIKELGSQILKEHPVENTQLQNEKLYLYYLQNGRDMYVDQELDINRLSDYDVDHIVPQSFLKDDSIDNKVLTRSDKARGKSDNVPSEEVVKKMKNYWRQLLNAKLITQRKFDNLTKAERGGLSELDKAGFIKRQLVETRQITKHVAQILDSRMNTKYDENDKLIREVKVITLKSKLVSDFRKDFQFYKVREINNYHHAHDAYLNAVVGTALIKKYPKLESEFVYGDYKVYDVRKMIAKSEQEIGKATAKYFFYSNIMNFFKTEITLANGEIRKRPLIETNGETGEIVWDKGRDFATVRKVLSMPQVNIVKKTEVQTGGFSKESILPKRNSDKLIARKKDWDPKKYGGFDSPTVAYSVLVVAKVEKGKSKKLKSVKELLGITIMERSSFEKNPIDFLEAKGYKEVKKDLIIKLPKYSLFELENGRKRMLASAGELQKGNELALPSKYVNFLYLASHYEKLKGSPEDNEQKQLFVEQHKHYLDEIIEQISEFSKRVILADANLDKVLSAYNKHRDKPIREQAENIIHLFTLTNLGAPAAFKYFDTTIDRKRYTSTKEVLDATLIHQSITGLYETRIDLSQLGGDGGSGGSSGGSSGSETPGTSESATPESSGGSSGGSSGGTAPLEEEYRLFLEAPIQNVTLLEQWKREIPKVWAEINPPGLASTQAPIHVQLLSTALPVRVRQYPITLEAKRSLRETIRKFRAAGILRPVHSPWNTPLLPVRKSGTSEYRMVQDLREVNKRVETIHPTVPNPYTLLSLLPPDRIWYSVLDLKDAFFCIPLAPESQLIFAFEWADAEEGESGQLTWTRLPQGFKNSPTLFDEALNRDLQGFRLDHPSVSLLQYVDDLLIAADTQAACLSATRDLLMTLAELGYRVSGKKAQLCQEEVTYLGFKIHKGSRSLSNSRTQAILQIPVPKTKRQVREFLGTIGYCRLWIPGFAELAQPLYAATRGGNDPLVWGEKEEEAFQSLKLALTQPPALALPSLDKPFQLFVEETSGAAKGVLTQALGPWKRPVAYLSKRLDPVAAGWPRCLRAIAAAALLTREASKLTFGQDIEITSSHNLESLLRSPPDKWLTNARITQYQVLLLDPPRVRFKQTAALNPATLLPETDDTLPIHHCLDTLDSLTSTRPDLTDQPLAQAEATLFTDGSSYIRDGKRYAGAAVVTLDSVIWAEPLPIGTSAQKAELIALTKALEWSKDKSVNIYTDSRYAFATLHVHGMIYRERGLLTAGGKAIKNAPEILALLTAVWLPKRVAVMHCKGHQKDDAPTSTGNRRADEVAREVAIRPLSTQATISAGKRTADGSEFEKRTADGSEFESPKKKAKVE

SEQ ID NO: 7721 - protein, 2120 aa, synthetic construct
MPAAKRVKLDGGDKKYSIGLDIGTNSVGWAVITDEYKVPSKKFKVLGNTDRHSIKKNLIGALLFDSGETAEATRLKRTARRRYTRRKNRICYLQEIFSNEMAKVDDSFFHRLEESFLVEEDKKHERHPIFGNIVDEVAYHEKYPTIYHLRKKLVDSTDKADLRLIYLALAHMIKFRGHFLIEGDLNPDNSDVDKLFIQLVQTYNQLFEENPINASGVDAKAILSARLSKSRRLENLIAQLPGEKKNGLFGNLIALSLGLTPNFKSNFDLAEDAKLQLSKDTYDDDLDNLLAQIGDQYADLFLAAKNLSDAILLSDILRVNTEITKAPLSASMIKRYDEHHQDLTLLKALVRQQLPEKYKEIFFDQSKNGYAGYIDGGASQEEFYKFIKPILEKMDGTEELLVKLNREDLLRKQRTFDNGSIPHQIHLGELHAILRRQEDFYPFLKDNREKIEKILTFRIPYYVGPLARGNSRFAWMTRKSEETITPWNFEEVVDKGASAQSFIERMTNFDKNLPNEKVLPKHSLLYEYFTVYNELTKVKYVTEGMRKPAFLSGEQKKAIVDLLFKTNRKVTVKQLKEDYFKKIECFDSVEISGVEDRFNASLGTYHDLLKIIKDKDFLDNEENEDILEDIVLTLTLFEDREMIEERLKTYAHLFDDKVMKQLKRRRYTGWGRLSRKLINGIRDKQSGKTILDFLKSDGFANRNFMQLIHDDSLTFKEDIQKAQVSGQGDSLHEHIANLAGSPAIKKGILQTVKVVDELVKVMGRHKPENIVIEMARENQTTQKGQKNSRERMKRIEEGIKELGSQILKEHPVENTQLQNEKLYLYYLQNGRDMYVDQELDINRLSDYDVDHIVPQSFLKDDSIDNKVLTRSDKARGKSDNVPSEEVVKKMKNYWRQLLNAKLITQRKFDNLTKAERGGLSELDKAGFIKRQLVETRQITKHVAQILDSRMNTKYDENDKLIREVKVITLKSKLVSDFRKDFQFYKVREINNYHHAHDAYLNAVVGTALIKKYPKLESEFVYGDYKVYDVRKMIAKSEQEIGKATAKYFFYSNIMNFFKTEITLANGEIRKRPLIETNGETGEIVWDKGRDFATVRKVLSMPQVNIVKKTEVQTGGFSKESILPKRNSDKLIARKKDWDPKKYGGFDSPTVAYSVLVVAKVEKGKSKKLKSVKELLGITIMERSSFEKNPIDFLEAKGYKEVKKDLIIKLPKYSLFELENGRKRMLASAGELQKGNELALPSKYVNFLYLASHYEKLKGSPEDNEQKQLFVEQHKHYLDEIIEQISEFSKRVILADANLDKVLSAYNKHRDKPIREQAENIIHLFTLTNLGAPAAFKYFDTTIDRKRYTSTKEVLDATLIHQSITGLYETRIDLSQLGGDGGSGGSSGGSSGSETPGTSESATPESSGGSSGGSSGGTAPLEEEYRLFLEAPIQNVTLLEQWKREIPKVWAEINPPGLASTQAPIHVQLLSTALPVRVRQYPITLEAKRSLRETIRKFRAAGILRPVHSPWNTPLLPVRKSGTSEYRMVQDLREVNKRVETIHPTVPNPYTLLSLLPPDRIWYSVLDLKDAFFCIPLAPESQLIFAFEWADAEEGESGQLTWTRLPQGFKNSPTLFNEALNRDLQGFRLDHPSVSLLQYVDDLLIAADTQAACLSATRDLLMTLAELGYRVSGKKAQLCQEEVTYLGFKIHKGSRSLSNSRTQAILQIPVPKTKRQVREFLGTIGYCRLWIPGFAELAQPLYAATRPGNDPLVWGEKEEEAFQSLKLALTQPPALALPSLDKPFQLFVEETSGAAKGVLTQALGPWKRPVAYLSKRLDPVAAGWPRCLRAIAAAALLTREASKLTFGQDIEITSSHNLESLLRSPPDKWLTNARITQYQVLLLDPPRVRFKQTAALNPATLLPETDDTLPIHHCLDTLDSLTSTRPDLTDQPLAQAEATLFTDGSSYIRDGKRYAGAAVVTLDSVIWAEPLPIGTSAQKAELIALTKALEWSKDKSVNIYTDSRYAFATLHVHGMIYRERGWLTAGGKAIKNAPEILALLTAVWLPKRVAVMHCKGHQKDDAPTSTGNRRADEVAREVAIRPLSTQATISAGKRTADGSEFEKRTADGSEFESPKKKAKVE

SEQ ID NO: 7722 - protein, 2124 aa, synthetic construct
MPAAKRVKLDGGDKKYSIGLDIGTNSVGWAVITDEYKVPSKKFKVLGNTDRHSIKKNLIGALLFDSGETAEATRLKRTARRRYTRRKNRICYLQEIFSNEMAKVDDSFFHRLEESFLVEEDKKHERHPIFGNIVDEVAYHEKYPTIYHLRKKLVDSTDKADLRLIYLALAHMIKFRGHFLIEGDLNPDNSDVDKLFIQLVQTYNQLFEENPINASGVDAKAILSARLSKSRRLENLIAQLPGEKKNGLFGNLIALSLGLTPNFKSNFDLAEDAKLQLSKDTYDDDLDNLLAQIGDQYADLFLAAKNLSDAILLSDILRVNTEITKAPLSASMIKRYDEHHQDLTLLKALVRQQLPEKYKEIFFDQSKNGYAGYIDGGASQEEFYKFIKPILEKMDGTEELLVKLNREDLLRKQRTFDNGSIPHQIHLGELHAILRRQEDFYPFLKDNREKIEKILTFRIPYYVGPLARGNSRFAWMTRKSEETITPWNFEEVVDKGASAQSFIERMTNFDKNLPNEKVLPKHSLLYEYFTVYNELTKVKYVTEGMRKPAFLSGEQKKAIVDLLFKTNRKVTVKQLKEDYFKKIECFDSVEISGVEDRFNASLGTYHDLLKIIKDKDFLDNEENEDILEDIVLTLTLFEDREMIEERLKTYAHLFDDKVMKQLKRRRYTGWGRLSRKLINGIRDKQSGKTILDFLKSDGFANRNFMQLIHDDSLTFKEDIQKAQVSGQGDSLHEHIANLAGSPAIKKGILQTVKVVDELVKVMGRHKPENIVIEMARENQTTQKGQKNSRERMKRIEEGIKELGSQILKEHPVENTQLQNEKLYLYYLQNGRDMYVDQELDINRLSDYDVDHIVPQSFLKDDSIDNKVLTRSDKARGKSDNVPSEEVVKKMKNYWRQLLNAKLITQRKFDNLTKAERGGLSELDKAGFIKRQLVETRQITKHVAQILDSRMNTKYDENDKLIREVKVITLKSKLVSDFRKDFQFYKVREINNYHHAHDAYLNAVVGTALIKKYPKLESEFVYGDYKVYDVRKMIAKSEQEIGKATAKYFFYSNIMNFFKTEITLANGEIRKRPLIETNGETGEIVWDKGRDFATVRKVLSMPQVNIVKKTEVQTGGFSKESILPKRNSDKLIARKKDWDPKKYGGFDSPTVAYSVLVVAKVEKGKSKKLKSVKELLGITIMERSSFEKNPIDFLEAKGYKEVKKDLIIKLPKYSLFELENGRKRMLASAGELQKGNELALPSKYVNFLYLASHYEKLKGSPEDNEQKQLFVEQHKHYLDEIIEQISEFSKRVILADANLDKVLSAYNKHRDKPIREQAENIIHLFTLTNLGAPAAFKYFDTTIDRKRYTSTKEVLDATLIHQSITGLYETRIDLSQLGGDGGSGGSSGGSSGSETPGTSESATPESSGGSSGGSSGGTVSLQDEHRLFDIPVTTSLPDVWLQDFPQAWAETGGLGRAKCQAPIIIDLKPTAVPVSIKQYPMSLEAHMGIRQHIIKFLELGVLRPCRSPWNTPLLPVKKPGTQDYRPVQDLREINKRTVDIHPTVPNPYNLLSTLKPDYSWYTVLDLKDAFFCLPLAPQSQELFAFEWKDPERGISGQLTWTRLPQGFKNSPTLFDEALHRDLTDFRTQHPEVTLLQYVDDLLLAAPTKKACTQGTRHLLQELGEKGYRASAKKAQICQTKVTYLGYILSEGKRWLTPGRIETVARIPPPRNPREVREFLGTAGFCRLWIPGFAELAAPLYALTKESTPFTWQTEHQLAFEALKKALLSAPALGLPDTSKPFTLFLDERQGIAKGVLTQKLGPWKRPVAYLSKKLDPVAAGWPPCLRIMAATAMLVKDSAKLTLGQPLTVITPHTLEAIVRQPPDRWITNARLTHYQALLLDTDRVQFGPPVTLNPATLLPVPENQPSPHDCRQVLAETHGTREDLKDQELPDADHTWYTDGSSYLDSGTRRAGAAVVDGHNTIWAQSLPPGTSAQKAELIALTKALELSKGKKANIYTDSRYAFATAHTHGSIYERRGLLTSEGKEIKNKAEIIALLKALFLPQEVAIIHCPGHQKGQDPVAVGNRQADRVARQAAMAEVLTLATEPDNTSHITAGKRTADGSEFEKRTADGSEFESPKKKAKVE

SEQ ID NO: 7723 - protein, 2124 aa, synthetic construct
MPAAKRVKLDGGDKKYSIGLDIGTNSVGWAVITDEYKVPSKKFKVLGNTDRHSIKKNLIGALLFDSGETAEATRLKRTARRRYTRRKNRICYLQEIFSNEMAKVDDSFFHRLEESFLVEEDKKHERHPIFGNIVDEVAYHEKYPTIYHLRKKLVDSTDKADLRLIYLALAHMIKFRGHFLIEGDLNPDNSDVDKLFIQLVQTYNQLFEENPINASGVDAKAILSARLSKSRRLENLIAQLPGEKKNGLFGNLIALSLGLTPNFKSNFDLAEDAKLQLSKDTYDDDLDNLLAQIGDQYADLFLAAKNLSDAILLSDILRVNTEITKAPLSASMIKRYDEHHQDLTLLKALVRQQLPEKYKEIFFDQSKNGYAGYIDGGASQEEFYKFIKPILEKMDGTEELLVKLNREDLLRKQRTFDNGSIPHQIHLGELHAILRRQEDFYPFLKDNREKIEKILTFRIPYYVGPLARGNSRFAWMTRKSEETITPWNFEEVVDKGASAQSFIERMTNFDKNLPNEKVLPKHSLLYEYFTVYNELTKVKYVTEGMRKPAFLSGEQKKAIVDLLFKTNRKVTVKQLKEDYFKKIECFDSVEISGVEDRFNASLGTYHDLLKIIKDKDFLDNEENEDILEDIVLTLTLFEDREMIEERLKTYAHLFDDKVMKQLKRRRYTGWGRLSRKLINGIRDKQSGKTILDFLKSDGFANRNFMQLIHDDSLTFKEDIQKAQVSGQGDSLHEHIANLAGSPAIKKGILQTVKVVDELVKVMGRHKPENIVIEMARENQTTQKGQKNSRERMKRIEEGIKELGSQILKEHPVENTQLQNEKLYLYYLQNGRDMYVDQELDINRLSDYDVDHIVPQSFLKDDSIDNKVLTRSDKARGKSDNVPSEEVVKKMKNYWRQLLNAKLITQRKFDNLTKAERGGLSELDKAGFIKRQLVETRQITKHVAQILDSRMNTKYDENDKLIREVKVITLKSKLVSDFRKDFQFYKVREINNYHHAHDAYLNAVVGTALIKKYPKLESEFVYGDYKVYDVRKMIAKSEQEIGKATAKYFFYSNIMNFFKTEITLANGEIRKRPLIETNGETGEIVWDKGRDFATVRKVLSMPQVNIVKKTEVQTGGFSKESILPKRNSDKLIARKKDWDPKKYGGFDSPTVAYSVLVVAKVEKGKSKKLKSVKELLGITIMERSSFEKNPIDFLEAKGYKEVKKDLIIKLPKYSLFELENGRKRMLASAGELQKGNELALPSKYVNFLYLASHYEKLKGSPEDNEQKQLFVEQHKHYLDEIIEQISEFSKRVILADANLDKVLSAYNKHRDKPIREQAENIIHLFTLTNLGAPAAFKYFDTTIDRKRYTSTKEVLDATLIHQSITGLYETRIDLSQLGGDGGSGGSSGGSSGSETPGTSESATPESSGGSSGGSSGGTVSLQDEHRLFDIPVTTSLPDVWLQDFPQAWAETGGLGRAKCQAPIIIDLKPTAVPVSIKQYPMSLEAHMGIRQHIIKFLELGVLRPCRSPWNTPLLPVKKPGTQDYRPVQDLREINKRTVDIHPTVPNPYNLLSTLKPDYSWYTVLDLKDAFFCLPLAPQSQELFAFEWKDPERGISGQLTWTRLPQGFKNSPTLFNEALHRDLTDFRTQHPEVTLLQYVDDLLLAAPTKKACTQGTRHLLQELGEKGYRASAKKAQICQTKVTYLGYILSEGKRWLTPGRIETVARIPPPRNPREVREFLGTAGFCRLWIPGFAELAAPLYALTKPSTPFTWQTEHQLAFEALKKALLSAPALGLPDTSKPFTLFLDERQGIAKGVLTQKLGPWKRPVAYLSKKLDPVAAGWPPCLRIMAATAMLVKDSAKLTLGQPLTVITPHTLEAIVRQPPDRWITNARLTHYQALLLDTDRVQFGPPVTLNPATLLPVPENQPSPHDCRQVLAETHGTREDLKDQELPDADHTWYTDGSSYLDSGTRRAGAAVVDGHNTIWAQSLPPGTSAQKAELIALTKALELSKGKKANIYTDSRYAFATAHTHGSIYERRGWLTSEGKEIKNKAEIIALLKALFLPQEVAIIHCPGHQKGQDPVAVGNRQADRVARQAAMAEVLTLATEPDNTSHITAGKRTADGSEFEKRTADGSEFESPKKKAKVE

SEQ ID NO: 7724 - protein, 2109 aa, synthetic construct
MPAAKRVKLDGGDKKYSIGLDIGTNSVGWAVITDEYKVPSKKFKVLGNTDRHSIKKNLIGALLFDSGETAEATRLKRTARRRYTRRKNRICYLQEIFSNEMAKVDDSFFHRLEESFLVEEDKKHERHPIFGNIVDEVAYHEKYPTIYHLRKKLVDSTDKADLRLIYLALAHMIKFRGHFLIEGDLNPDNSDVDKLFIQLVQTYNQLFEENPINASGVDAKAILSARLSKSRRLENLIAQLPGEKKNGLFGNLIALSLGLTPNFKSNFDLAEDAKLQLSKDTYDDDLDNLLAQIGDQYADLFLAAKNLSDAILLSDILRVNTEITKAPLSASMIKRYDEHHQDLTLLKALVRQQLPEKYKEIFFDQSKNGYAGYIDGGASQEEFYKFIKPILEKMDGTEELLVKLNREDLLRKQRTFDNGSIPHQIHLGELHAILRRQEDFYPFLKDNREKIEKILTFRIPYYVGPLARGNSRFAWMTRKSEETITPWNFEEVVDKGASAQSFIERMTNFDKNLPNEKVLPKHSLLYEYFTVYNELTKVKYVTEGMRKPAFLSGEQKKAIVDLLFKTNRKVTVKQLKEDYFKKIECFDSVEISGVEDRFNASLGTYHDLLKIIKDKDFLDNEENEDILEDIVLTLTLFEDREMIEERLKTYAHLFDDKVMKQLKRRRYTGWGRLSRKLINGIRDKQSGKTILDFLKSDGFANRNFMQLIHDDSLTFKEDIQKAQVSGQGDSLHEHIANLAGSPAIKKGILQTVKVVDELVKVMGRHKPENIVIEMARENQTTQKGQKNSRERMKRIEEGIKELGSQILKEHPVENTQLQNEKLYLYYLQNGRDMYVDQELDINRLSDYDVDHIVPQSFLKDDSIDNKVLTRSDKARGKSDNVPSEEVVKKMKNYWRQLLNAKLITQRKFDNLTKAERGGLSELDKAGFIKRQLVETRQITKHVAQILDSRMNTKYDENDKLIREVKVITLKSKLVSDFRKDFQFYKVREINNYHHAHDAYLNAVVGTALIKKYPKLESEFVYGDYKVYDVRKMIAKSEQEIGKATAKYFFYSNIMNFFKTEITLANGEIRKRPLIETNGETGEIVWDKGRDFATVRKVLSMPQVNIVKKTEVQTGGFSKESILPKRNSDKLIARKKDWDPKKYGGFDSPTVAYSVLVVAKVEKGKSKKLKSVKELLGITIMERSSFEKNPIDFLEAKGYKEVKKDLIIKLPKYSLFELENGRKRMLASAGELQKGNELALPSKYVNFLYLASHYEKLKGSPEDNEQKQLFVEQHKHYLDEIIEQISEFSKRVILADANLDKVLSAYNKHRDKPIREQAENIIHLFTLTNLGAPAAFKYFDTTIDRKRYTSTKEVLDATLIHQSITGLYETRIDLSQLGGDGGSGGSSGGSSGSETPGTSESATPESSGGSSGGSSGGVPWILKKPLELTIKLDLEEQQGTLLNNSILSKKGKEELKQLFEKYSALWQSWENQVGHRRIRPHKIATGTVKPTPQKQYHINPKAKPDIQIVINDLLKQGVLIQKESTMNTPVYPVPKPNGRWRMVLDYRAVNKVTPLIAVQNQHSYGILGSLFKGRYKTTIDLSNGFWAHPIVPEDYWITAFTWQGKQYCWTVLPQGFLNSPGLFTGDVVDLLQGIPNVEVYVDDVYISHDSEKEHLEYLDILFNRLKEAGYIISLKKSNIANSIVDFLGFQITNEGRGLTDTFKEKLENITAPTTLKQLQSILGLLNFARNFIPDFTELIAPLYALIPKSTKNYVPWQIEHSTTLETLITKLNGAEYLQGRKGDKTLIMKVNASYTTGYIRYYNEGEKKPISYVSIVFSKTELKFTELEKLLTTVHKGLLKALDLSMGQNIHVYSPIVSMQNIQKTPQTAKKALASRWLSWLSYLEDPRIRFFYDPQMPALKDLPAVDTGKDNKKHPSNFQHIFYTDGSAITSPTKEGHLNAGMGIVYFINKDGNLQKQQEWSISLGNHTAQFAEIAAFEFALKKCLPLGGNILVVTDSNYVAKAYNEELDVWASNGFVNNRKKPLKHISKWKSVADLKRLRPDVVVTHEPGHQKLDSSPHAYGNNLADQLATQASFKVHAGKRTADGSEFEKRTADGSEFESPKKKAKVE

SEQ ID NO: 7725 - protein, 2109 aa, synthetic construct
MPAAKRVKLDGGDKKYSIGLDIGTNSVGWAVITDEYKVPSKKFKVLGNTDRHSIKKNLIGALLFDSGETAEATRLKRTARRRYTRRKNRICYLQEIFSNEMAKVDDSFFHRLEESFLVEEDKKHERHPIFGNIVDEVAYHEKYPTIYHLRKKLVDSTDKADLRLIYLALAHMIKFRGHFLIEGDLNPDNSDVDKLFIQLVQTYNQLFEENPINASGVDAKAILSARLSKSRRLENLIAQLPGEKKNGLFGNLIALSLGLTPNFKSNFDLAEDAKLQLSKDTYDDDLDNLLAQIGDQYADLFLAAKNLSDAILLSDILRVNTEITKAPLSASMIKRYDEHHQDLTLLKALVRQQLPEKYKEIFFDQSKNGYAGYIDGGASQEEFYKFIKPILEKMDGTEELLVKLNREDLLRKQRTFDNGSIPHQIHLGELHAILRRQEDFYPFLKDNREKIEKILTFRIPYYVGPLARGNSRFAWMTRKSEETITPWNFEEVVDKGASAQSFIERMTNFDKNLPNEKVLPKHSLLYEYFTVYNELTKVKYVTEGMRKPAFLSGEQKKAIVDLLFKTNRKVTVKQLKEDYFKKIECFDSVEISGVEDRFNASLGTYHDLLKIIKDKDFLDNEENEDILEDIVLTLTLFEDREMIEERLKTYAHLFDDKVMKQLKRRRYTGWGRLSRKLINGIRDKQSGKTILDFLKSDGFANRNFMQLIHDDSLTFKEDIQKAQVSGQGDSLHEHIANLAGSPAIKKGILQTVKVVDELVKVMGRHKPENIVIEMARENQTTQKGQKNSRERMKRIEEGIKELGSQILKEHPVENTQLQNEKLYLYYLQNGRDMYVDQELDINRLSDYDVDHIVPQSFLKDDSIDNKVLTRSDKARGKSDNVPSEEVVKKMKNYWRQLLNAKLITQRKFDNLTKAERGGLSELDKAGFIKRQLVETRQITKHVAQILDSRMNTKYDENDKLIREVKVITLKSKLVSDFRKDFQFYKVREINNYHHAHDAYLNAVVGTALIKKYPKLESEFVYGDYKVYDVRKMIAKSEQEIGKATAKYFFYSNIMNFFKTEITLANGEIRKRPLIETNGETGEIVWDKGRDFATVRKVLSMPQVNIVKKTEVQTGGFSKESILPKRNSDKLIARKKDWDPKKYGGFDSPTVAYSVLVVAKVEKGKSKKLKSVKELLGITIMERSSFEKNPIDFLEAKGYKEVKKDLIIKLPKYSLFELENGRKRMLASAGELQKGNELALPSKYVNFLYLASHYEKLKGSPEDNEQKQLFVEQHKHYLDEIIEQISEFSKRVILADANLDKVLSAYNKHRDKPIREQAENIIHLFTLTNLGAPAAFKYFDTTIDRKRYTSTKEVLDATLIHQSITGLYETRIDLSQLGGDGGSGGSSGGSSGSETPGTSESATPESSGGSSGGSSGGVPWLTQQPLQLTILVPLQEYQEKILSKTALPEDQKQQLKTLFVKYDNLWQHWENQVGHRKIRPHNIATGDYPPRPQKQYPINPKAKPSIQIVIDDLLKQGVLTPQNSTMNTPVYPVPKPDGRWRMVLDYREVNKTIPLTAAQNQHSAGILATIVRQKYKTTLDLANGFWAHPITPESYWLTAFTWQGKQYCWTRLPQGFLNSPALFNADVVDLLKEIPNVQVYVDDIYLSHDDPKEHVQQLEKVFQILLQAGYVVSLKKSEIGQKTVEFLGFNITKEGRGLTDTFKTKLLNITPPKDLKQLQSILGLLNFARNFIPNFAELVQPLYNLIAPAKGKYIEWSEENTKQLNMVIEALNTASNLEERLPEQRLVIKVNTSPSAGYVRYYNETGKKPIMYLNYVFSKAELKFSMLEKLLTTMHKALIKAMDLAMGQEILVYSPIVSMTKIQKTPLPERKALPIRWITWMTYLEDPRIQFHYDKTLPELKHIPDVYTSSQSPVKHPSQYEGVFYTDGSAIKSPDPTKSNNAGMGIVHATYKPEYQVLNQWSIPLGNHTAQMAEIAAVEFACKKALKIPGPVLVITDSFYVAESANKELPYWKSNGFVNNKKKPLKHISKWKSIAECLSMKPDITIQHEKGISLQIPVFILKGNALADKLATQGSYVVNAGKRTADGSEFEKRTADGSEFESPKKKAKVE

SEQ ID NO: 7726 - protein, 2198 aa, synthetic construct
MPAAKRVKLDGGDKKYSIGLDIGTNSVGWAVITDEYKVPSKKFKVLGNTDRHSIKKNLIGALLFDSGETAEATRLKRTARRRYTRRKNRICYLQEIFSNEMAKVDDSFFHRLEESFLVEEDKKHERHPIFGNIVDEVAYHEKYPTIYHLRKKLVDSTDKADLRLIYLALAHMIKFRGHFLIEGDLNPDNSDVDKLFIQLVQTYNQLFEENPINASGVDAKAILSARLSKSRRLENLIAQLPGEKKNGLFGNLIALSLGLTPNFKSNFDLAEDAKLQLSKDTYDDDLDNLLAQIGDQYADLFLAAKNLSDAILLSDILRVNTEITKAPLSASMIKRYDEHHQDLTLLKALVRQQLPEKYKEIFFDQSKNGYAGYIDGGASQEEFYKFIKPILEKMDGTEELLVKLNREDLLRKQRTFDNGSIPHQIHLGELHAILRRQEDFYPFLKDNREKIEKILTFRIPYYVGPLARGNSRFAWMTRKSEETITPWNFEEVVDKGASAQSFIERMTNFDKNLPNEKVLPKHSLLYEYFTVYNELTKVKYVTEGMRKPAFLSGEQKKAIVDLLFKTNRKVTVKQLKEDYFKKIECFDSVEISGVEDRFNASLGTYHDLLKIIKDKDFLDNEENEDILEDIVLTLTLFEDREMIEERLKTYAHLFDDKVMKQLKRRRYTGWGRLSRKLINGIRDKQSGKTILDFLKSDGFANRNFMQLIHDDSLTFKEDIQKAQVSGQGDSLHEHIANLAGSPAIKKGILQTVKVVDELVKVMGRHKPENIVIEMARENQTTQKGQKNSRERMKRIEEGIKELGSQILKEHPVENTQLQNEKLYLYYLQNGRDMYVDQELDINRLSDYDVDHIVPQSFLKDDSIDNKVLTRSDKARGKSDNVPSEEVVKKMKNYWRQLLNAKLITQRKFDNLTKAERGGLSELDKAGFIKRQLVETRQITKHVAQILDSRMNTKYDENDKLIREVKVITLKSKLVSDFRKDFQFYKVREINNYHHAHDAYLNAVVGTALIKKYPKLESEFVYGDYKVYDVRKMIAKSEQEIGKATAKYFFYSNIMNFFKTEITLANGEIRKRPLIETNGETGEIVWDKGRDFATVRKVLSMPQVNIVKKTEVQTGGFSKESILPKRNSDKLIARKKDWDPKKYGGFDSPTVAYSVLVVAKVEKGKSKKLKSVKELLGITIMERSSFEKNPIDFLEAKGYKEVKKDLIIKLPKYSLFELENGRKRMLASAGELQKGNELALPSKYVNFLYLASHYEKLKGSPEDNEQKQLFVEQHKHYLDEIIEQISEFSKRVILADANLDKVLSAYNKHRDKPIREQAENIIHLFTLTNLGAPAAFKYFDTTIDRKRYTSTKEVLDATLIHQSITGLYETRIDLSQLGGDGGSGGSSGGSSGSETPGTSESATPESSGGSSGGSSGGMNPLQLLQPLPAEIKGTKLLAHWNSGATITCIPESFLEDEQPIKKTLIKTIHGEKQQNVYYVTFKVKGRKVEAEVIASPYEYILLSPTDVPWLTQQPLQLTILVPLQEYQEKILSKTALPEDQKQQLKTLFVKYDNLWQHWENQVGHRKIRPHNIATGDYPPRPQKQYPINPKAKPSIQIVIDDLLKQGVLTPQNSTMNTPVYPVPKPDGRWRMVLDYREVNKTIPLTAAQNQHSAGILATIVRQKYKTTLDLANGFWAHPITPESYWLTAFTWQGKQYCWTRLPQGFLNSPALFNADVVDLLKEIPNVQVYVDDIYLSHDDPKEHVQQLEKVFQILLQAGYVVSLKKSEIGQKTVEFLGFNITKEGRGLTDTFKTKLLNITPPKDLKQLQSILGLLNFARNFIPNFAELVQPLYNLIAPAKGKYIEWSEENTKQLNMVIEALNTASNLEERLPEQRLVIKVNTSPSAGYVRYYNETGKKPIMYLNYVFSKAELKFSMLEKLLTTMHKALIKAMDLAMGQEILVYSPIVSMTKIQKTPLPERKALPIRWITWMTYLEDPRIQFHYDKTLPELKHIPDVYTSSQSPVKHPSQYEGVFYTDGSAIKSPDPTKSNNAGMGIVHATYKPEYQVLNQWSIPLGNHTAQMAEIAAVEFACKKALKIPGPVLVITDSFYVAESANKELPYWKSNGFVNNKKKPLKHISKWKSIAECLSMKPDITIQHEKGISLQIPVFILKGNALADKLATQGSYVVNAGKRTADGSEFEKRTADGSEFESPKKKAKVE

SEQ ID NO: 7727 - protein, 2149 aa, synthetic construct
MPAAKRVKLDGGDKKYSIGLDIGTNSVGWAVITDEYKVPSKKFKVLGNTDRHSIKKNLIGALLFDSGETAEATRLKRTARRRYTRRKNRICYLQEIFSNEMAKVDDSFFHRLEESFLVEEDKKHERHPIFGNIVDEVAYHEKYPTIYHLRKKLVDSTDKADLRLIYLALAHMIKFRGHFLIEGDLNPDNSDVDKLFIQLVQTYNQLFEENPINASGVDAKAILSARLSKSRRLENLIAQLPGEKKNGLFGNLIALSLGLTPNFKSNFDLAEDAKLQLSKDTYDDDLDNLLAQIGDQYADLFLAAKNLSDAILLSDILRVNTEITKAPLSASMIKRYDEHHQDLTLLKALVRQQLPEKYKEIFFDQSKNGYAGYIDGGASQEEFYKFIKPILEKMDGTEELLVKLNREDLLRKQRTFDNGSIPHQIHLGELHAILRRQEDFYPFLKDNREKIEKILTFRIPYYVGPLARGNSRFAWMTRKSEETITPWNFEEVVDKGASAQSFIERMTNFDKNLPNEKVLPKHSLLYEYFTVYNELTKVKYVTEGMRKPAFLSGEQKKAIVDLLFKTNRKVTVKQLKEDYFKKIECFDSVEISGVEDRFNASLGTYHDLLKIIKDKDFLDNEENEDILEDIVLTLTLFEDREMIEERLKTYAHLFDDKVMKQLKRRRYTGWGRLSRKLINGIRDKQSGKTILDFLKSDGFANRNFMQLIHDDSLTFKEDIQKAQVSGQGDSLHEHIANLAGSPAIKKGILQTVKVVDELVKVMGRHKPENIVIEMARENQTTQKGQKNSRERMKRIEEGIKELGSQILKEHPVENTQLQNEKLYLYYLQNGRDMYVDQELDINRLSDYDVDHIVPQSFLKDDSIDNKVLTRSDKARGKSDNVPSEEVVKKMKNYWRQLLNAKLITQRKFDNLTKAERGGLSELDKAGFIKRQLVETRQITKHVAQILDSRMNTKYDENDKLIREVKVITLKSKLVSDFRKDFQFYKVREINNYHHAHDAYLNAVVGTALIKKYPKLESEFVYGDYKVYDVRKMIAKSEQEIGKATAKYFFYSNIMNFFKTEITLANGEIRKRPLIETNGETGEIVWDKGRDFATVRKVLSMPQVNIVKKTEVQTGGFSKESILPKRNSDKLIARKKDWDPKKYGGFDSPTVAYSVLVVAKVEKGKSKKLKSVKELLGITIMERSSFEKNPIDFLEAKGYKEVKKDLIIKLPKYSLFELENGRKRMLASAGELQKGNELALPSKYVNFLYLASHYEKLKGSPEDNEQKQLFVEQHKHYLDEIIEQISEFSKRVILADANLDKVLSAYNKHRDKPIREQAENIIHLFTLTNLGAPAAFKYFDTTIDRKRYTSTKEVLDATLIHQSITGLYETRIDLSQLGGDGGSGGSSGGSSGSETPGTSESATPESSGGSSGGSSGGLLGRDLLTKLKAQIQFSTEGPQVTWEDRPAMCLVLNLEEEYRLHEKPVPPSIDPSWLQLFPMVWAEKAGMGLANQVPPVVVELKSDASPVAVRQYPMSKEAREGIRPHIQRFLDLGILVPCQSPWNTPLLPVKKPGTNDYRPVQDLREVNKRVQDIHPTVPNPYNLLSSLPPSHTWYSVLDLKDAFFCLKLHPNSQPLFAFEWRDPEKGNTGQLTWTRLPQGFKNSPTLFDEALHRDLASFRALNPQVVMLQYVDDLLVAAPTYRDCKEGTRRLLQELSKLGYRVSAKKAQLCREEVTYLGYLLKGGKRWLTPARKATVMKIPTPTTPRQVREFLGTAGFCRLWIPGFASLAAPLYPLTREKVPFTWTEAHQEAFGRIKEALLSAPALALPDLTKPFALYVDEKEGVARGVLTQTLGPWRRPVAYLSKKLDPVASGWPTCLKAIAAVALLLKDADKLTLGQNVLVIAPHNLESIVRQPPDRWMTNARMTHYQSLLLNERVSFAPPAILNPATLLPVESDDTPIHICSEILAEETGTRPDLRDQPLPGVPAWYTDGSSFIMDGRRQAGAAIVDNKRTVWASNLPEGTSAQKAELIALTQALRLAEGKSINIYTDSRYAFATAHVHGAIYKQRGLLTSAGKDIKNKEEILALLEAIHLPKRVAIIHCPGHQRGTDPVATGNRKADEAAKQAAQSTRILTETTKNAGKRTADGSEFEKRTADGSEFESPKKKAKVE

SEQ ID NO: 7728 - protein, 2149 aa, synthetic construct
MPAAKRVKLDGGDKKYSIGLDIGTNSVGWAVITDEYKVPSKKFKVLGNTDRHSIKKNLIGALLFDSGETAEATRLKRTARRRYTRRKNRICYLQEIFSNEMAKVDDSFFHRLEESFLVEEDKKHERHPIFGNIVDEVAYHEKYPTIYHLRKKLVDSTDKADLRLIYLALAHMIKFRGHFLIEGDLNPDNSDVDKLFIQLVQTYNQLFEENPINASGVDAKAILSARLSKSRRLENLIAQLPGEKKNGLFGNLIALSLGLTPNFKSNFDLAEDAKLQLSKDTYDDDLDNLLAQIGDQYADLFLAAKNLSDAILLSDILRVNTEITKAPLSASMIKRYDEHHQDLTLLKALVRQQLPEKYKEIFFDQSKNGYAGYIDGGASQEEFYKFIKPILEKMDGTEELLVKLNREDLLRKQRTFDNGSIPHQIHLGELHAILRRQEDFYPFLKDNREKIEKILTFRIPYYVGPLARGNSRFAWMTRKSEETITPWNFEEVVDKGASAQSFIERMTNFDKNLPNEKVLPKHSLLYEYFTVYNELTKVKYVTEGMRKPAFLSGEQKKAIVDLLFKTNRKVTVKQLKEDYFKKIECFDSVEISGVEDRFNASLGTYHDLLKIIKDKDFLDNEENEDILEDIVLTLTLFEDREMIEERLKTYAHLFDDKVMKQLKRRRYTGWGRLSRKLINGIRDKQSGKTILDFLKSDGFANRNFMQLIHDDSLTFKEDIQKAQVSGQGDSLHEHIANLAGSPAIKKGILQTVKVVDELVKVMGRHKPENIVIEMARENQTTQKGQKNSRERMKRIEEGIKELGSQILKEHPVENTQLQNEKLYLYYLQNGRDMYVDQELDINRLSDYDVDHIVPQSFLKDDSIDNKVLTRSDKARGKSDNVPSEEVVKKMKNYWRQLLNAKLITQRKFDNLTKAERGGLSELDKAGFIKRQLVETRQITKHVAQILDSRMNTKYDENDKLIREVKVITLKSKLVSDFRKDFQFYKVREINNYHHAHDAYLNAVVGTALIKKYPKLESEFVYGDYKVYDVRKMIAKSEQEIGKATAKYFFYSNIMNFFKTEITLANGEIRKRPLIETNGETGEIVWDKGRDFATVRKVLSMPQVNIVKKTEVQTGGFSKESILPKRNSDKLIARKKDWDPKKYGGFDSPTVAYSVLVVAKVEKGKSKKLKSVKELLGITIMERSSFEKNPIDFLEAKGYKEVKKDLIIKLPKYSLFELENGRKRMLASAGELQKGNELALPSKYVNFLYLASHYEKLKGSPEDNEQKQLFVEQHKHYLDEIIEQISEFSKRVILADANLDKVLSAYNKHRDKPIREQAENIIHLFTLTNLGAPAAFKYFDTTIDRKRYTSTKEVLDATLIHQSITGLYETRIDLSQLGGDGGSGGSSGGSSGSETPGTSESATPESSGGSSGGSSGGLLGRDLLTKLKAQIQFSTEGPQVTWEDRPAMCLVLNLEEEYRLHEKPVPPSIDPSWLQLFPMVWAEKAGMGLANQVPPVVVELKSDASPVAVRQYPMSKEAREGIRPHIQRFLDLGILVPCQSPWNTPLLPVKKPGTNDYRPVQDLREVNKRVQDIHPTVPNPYNLLSSLPPSHTWYSVLDLKDAFFCLKLHPNSQPLFAFEWRDPEKGNTGQLTWTRLPQGFKNSPTLFNEALHRDLASFRALNPQVVMLQYVDDLLVAAPTYRDCKEGTRRLLQELSKLGYRVSAKKAQLCREEVTYLGYLLKGGKRWLTPARKATVMKIPTPTTPRQVREFLGKAGFCRLFIPGFASLAAPLYPLTRPKVPFTWTEAHQEAFGRIKEALLSAPALALPDLTKPFALYVDEKEGVARGVLTQTLGPWRRPVAYLSKKLDPVASGWPTCLKAIAAVALLLKDADKLTLGQNVLVIAPHNLESIVRQPPDRWMTNARMTHYQSLLLNERVSFAPPAILNPATLLPVESDDTPIHICSEILAEETGTRPDLRDQPLPGVPAWYTDGSSFIMDGRRQAGAAIVDNKRTVWASNLPEGTSAQKAELIALTQALRLAEGKSINIYTDSRYAFATAHVHGAIYKQRGWLTSAGKDIKNKEEILALLEAIHLPKRVAIIHCPGHQRGTDPVATGNRKADEAAKQAAQSTRILTETTKNAGKRTADGSEFEKRTADGSEFESPKKKAKVE

SEQ ID NO: 7729 - protein, 2118 aa, synthetic construct
MPAAKRVKLDGGDKKYSIGLDIGTNSVGWAVITDEYKVPSKKFKVLGNTDRHSIKKNLIGALLFDSGETAEATRLKRTARRRYTRRKNRICYLQEIFSNEMAKVDDSFFHRLEESFLVEEDKKHERHPIFGNIVDEVAYHEKYPTIYHLRKKLVDSTDKADLRLIYLALAHMIKFRGHFLIEGDLNPDNSDVDKLFIQLVQTYNQLFEENPINASGVDAKAILSARLSKSRRLENLIAQLPGEKKNGLFGNLIALSLGLTPNFKSNFDLAEDAKLQLSKDTYDDDLDNLLAQIGDQYADLFLAAKNLSDAILLSDILRVNTEITKAPLSASMIKRYDEHHQDLTLLKALVRQQLPEKYKEIFFDQSKNGYAGYIDGGASQEEFYKFIKPILEKMDGTEELLVKLNREDLLRKQRTFDNGSIPHQIHLGELHAILRRQEDFYPFLKDNREKIEKILTFRIPYYVGPLARGNSRFAWMTRKSEETITPWNFEEVVDKGASAQSFIERMTNFDKNLPNEKVLPKHSLLYEYFTVYNELTKVKYVTEGMRKPAFLSGEQKKAIVDLLFKTNRKVTVKQLKEDYFKKIECFDSVEISGVEDRFNASLGTYHDLLKIIKDKDFLDNEENEDILEDIVLTLTLFEDREMIEERLKTYAHLFDDKVMKQLKRRRYTGWGRLSRKLINGIRDKQSGKTILDFLKSDGFANRNFMQLIHDDSLTFKEDIQKAQVSGQGDSLHEHIANLAGSPAIKKGILQTVKVVDELVKVMGRHKPENIVIEMARENQTTQKGQKNSRERMKRIEEGIKELGSQILKEHPVENTQLQNEKLYLYYLQNGRDMYVDQELDINRLSDYDVDHIVPQSFLKDDSIDNKVLTRSDKARGKSDNVPSEEVVKKMKNYWRQLLNAKLITQRKFDNLTKAERGGLSELDKAGFIKRQLVETRQITKHVAQILDSRMNTKYDENDKLIREVKVITLKSKLVSDFRKDFQFYKVREINNYHHAHDAYLNAVVGTALIKKYPKLESEFVYGDYKVYDVRKMIAKSEQEIGKATAKYFFYSNIMNFFKTEITLANGEIRKRPLIETNGETGEIVWDKGRDFATVRKVLSMPQVNIVKKTEVQTGGFSKESILPKRNSDKLIARKKDWDPKKYGGFDSPTVAYSVLVVAKVEKGKSKKLKSVKELLGITIMERSSFEKNPIDFLEAKGYKEVKKDLIIKLPKYSLFELENGRKRMLASAGELQKGNELALPSKYVNFLYLASHYEKLKGSPEDNEQKQLFVEQHKHYLDEIIEQISEFSKRVILADANLDKVLSAYNKHRDKPIREQAENIIHLFTLTNLGAPAAFKYFDTTIDRKRYTSTKEVLDATLIHQSITGLYETRIDLSQLGGDGGSGGSSGGSSGSETPGTSESATPESSGGSSGGSSGGTLNLEDEYRLYETSAEPEVSPGSTWLSDFPQAWAETGGMGLAVRQAPLIIPLKATSTPVSIKQYPMSQEAKLGIKPHIQRLLDQGILVPCQSPWNTPLLPVKKPGTNDYRPVQDLREVNKRVEDIHPTVPNPYNLLSGLPPSHRWYTVLDLKDAFFCLRLHPTSQPLFAFEWRDPGMGISGQLTWTRLPQGFKNSPTLFNEALHRDLADFRIQHPDLILLQYVDDILLAATSELDCQQGTRALLLTLGNLGYRASAKKAQLCQKQVKYLGYLLKEGQRWLTEARKETVMGQPTPKTPRQLREFLGKAGFCRLFIPGFAEMAAPLYPLTKPGTLFNWGPDQQKAYQEIKQALLTAPALGLPDLTKPFELFVDEKQGYAKGVLTQKLGPWRRPVAYLSKKLDPVAAGWPPCLRMVAAIAVLRKDAGKLTMGQPLVILAPHAVEALVKQPPDRWLSNARMTHYQAMLLDTDRVQFGPVVALNPATLLPLPEEGAPHDCLEILAETHGTRPDLTDQPIPDADHTWYTDGSSFLQEGQRKAGAAVTTETEVIWARALPAGTSAQRAELIALTQALKMAEGKRLNVYTDSRYAFATAHIHGEIYRRRGWLTSEGREIKNKSEILALLKALFLPKRLSIIHCLGHQKGDSAEARGNRLADQAAREAAIKTPPDTSTLLAGKRTADGSEFEKRTADGSEFESPKKKAKVE

SEQ ID NO: 7730 - protein, 2118 aa, synthetic construct
MPAAKRVKLDGGDKKYSIGLDIGTNSVGWAVITDEYKVPSKKFKVLGNTDRHSIKKNLIGALLFDSGETAEATRLKRTARRRYTRRKNRICYLQEIFSNEMAKVDDSFFHRLEESFLVEEDKKHERHPIFGNIVDEVAYHEKYPTIYHLRKKLVDSTDKADLRLIYLALAHMIKFRGHFLIEGDLNPDNSDVDKLFIQLVQTYNQLFEENPINASGVDAKAILSARLSKSRRLENLIAQLPGEKKNGLFGNLIALSLGLTPNFKSNFDLAEDAKLQLSKDTYDDDLDNLLAQIGDQYADLFLAAKNLSDAILLSDILRVNTEITKAPLSASMIKRYDEHHQDLTLLKALVRQQLPEKYKEIFFDQSKNGYAGYIDGGASQEEFYKFIKPILEKMDGTEELLVKLNREDLLRKQRTFDNGSIPHQIHLGELHAILRRQEDFYPFLKDNREKIEKILTFRIPYYVGPLARGNSRFAWMTRKSEETITPWNFEEVVDKGASAQSFIERMTNFDKNLPNEKVLPKHSLLYEYFTVYNELTKVKYVTEGMRKPAFLSGEQKKAIVDLLFKTNRKVTVKQLKEDYFKKIECFDSVEISGVEDRFNASLGTYHDLLKIIKDKDFLDNEENEDILEDIVLTLTLFEDREMIEERLKTYAHLFDDKVMKQLKRRRYTGWGRLSRKLINGIRDKQSGKTILDFLKSDGFANRNFMQLIHDDSLTFKEDIQKAQVSGQGDSLHEHIANLAGSPAIKKGILQTVKVVDELVKVMGRHKPENIVIEMARENQTTQKGQKNSRERMKRIEEGIKELGSQILKEHPVENTQLQNEKLYLYYLQNGRDMYVDQELDINRLSDYDVDHIVPQSFLKDDSIDNKVLTRSDKARGKSDNVPSEEVVKKMKNYWRQLLNAKLITQRKFDNLTKAERGGLSELDKAGFIKRQLVETRQITKHVAQILDSRMNTKYDENDKLIREVKVITLKSKLVSDFRKDFQFYKVREINNYHHAHDAYLNAVVGTALIKKYPKLESEFVYGDYKVYDVRKMIAKSEQEIGKATAKYFFYSNIMNFFKTEITLANGEIRKRPLIETNGETGEIVWDKGRDFATVRKVLSMPQVNIVKKTEVQTGGFSKESILPKRNSDKLIARKKDWDPKKYGGFDSPTVAYSVLVVAKVEKGKSKKLKSVKELLGITIMERSSFEKNPIDFLEAKGYKEVKKDLIIKLPKYSLFELENGRKRMLASAGELQKGNELALPSKYVNFLYLASHYEKLKGSPEDNEQKQLFVEQHKHYLDEIIEQISEFSKRVILADANLDKVLSAYNKHRDKPIREQAENIIHLFTLTNLGAPAAFKYFDTTIDRKRYTSTKEVLDATLIHQSITGLYETRIDLSQLGGDGGSGGSSGGSSGSETPGTSESATPESSGGSSGGSSGGTLNIEDEYRLHETSKEPDVSLGSTWLSDFPQAWAETGGMGLAVRQAPLIIPLKATSTPVSIKQYPMSQEARLGIKPHIQRLLDQGILVPCQSPWNTPLLPVKKPGTNDYRPVQDLREVNKRVEDIHPTVPNPYNLLSGLPPSHQWYTVLDLKDAFFCLRLHPTSQPLFAFEWRDPEMGISGQLTWTRLPQGFKNSPTLFNEALHRDLAGFRIQHPDLILLQYVDDLLLAATSELDCQQGTRALLQTLGDLGYRASAKKAQICQKQVKYLGYLLKEGQRWLTEARKETVMGQPIPKTPRQLREFLGTAGFCRLWIPGFAEMAAPLYPLTKPGTLFNWGPDQQKAFQEIKQALLTAPALGLPDLTKPFELFVDEKQGYAKGVLTQKLGPWRRPVAYLSKKLDPVAAGWPPCLRMVAAIAVLTKDAGKLTMGQPLVILAPHAVEALVKQPPDRWLSNARMTHYQALLLDTDRVQFGPVVALNPATLLPLPEEGLQHDCLDILAEAHGTRSDLMDQPLPDADHTWYTDGSSFLQEGQRKAGAAVTTETEVIWARALPAGTSAQRAELIALTQALKMAEGKKLNVYTDSRYAFATAHIHGEIYRRRGWLTSEGKEIKNKDEILALLKALFLPKRLSIIHCPGHQKGNSAEARGNRMADQAAREVATRETPETSTLLAGKRTADGSEFEKRTADGSEFESPKKKAKVE

SEQ ID NO: 7731 - protein, 2118 aa, synthetic construct
MPAAKRVKLDGGDKKYSIGLDIGTNSVGWAVITDEYKVPSKKFKVLGNTDRHSIKKNLIGALLFDSGETAEATRLKRTARRRYTRRKNRICYLQEIFSNEMAKVDDSFFHRLEESFLVEEDKKHERHPIFGNIVDEVAYHEKYPTIYHLRKKLVDSTDKADLRLIYLALAHMIKFRGHFLIEGDLNPDNSDVDKLFIQLVQTYNQLFEENPINASGVDAKAILSARLSKSRRLENLIAQLPGEKKNGLFGNLIALSLGLTPNFKSNFDLAEDAKLQLSKDTYDDDLDNLLAQIGDQYADLFLAAKNLSDAILLSDILRVNTEITKAPLSASMIKRYDEHHQDLTLLKALVRQQLPEKYKEIFFDQSKNGYAGYIDGGASQEEFYKFIKPILEKMDGTEELLVKLNREDLLRKQRTFDNGSIPHQIHLGELHAILRRQEDFYPFLKDNREKIEKILTFRIPYYVGPLARGNSRFAWMTRKSEETITPWNFEEVVDKGASAQSFIERMTNFDKNLPNEKVLPKHSLLYEYFTVYNELTKVKYVTEGMRKPAFLSGEQKKAIVDLLFKTNRKVTVKQLKEDYFKKIECFDSVEISGVEDRFNASLGTYHDLLKIIKDKDFLDNEENEDILEDIVLTLTLFEDREMIEERLKTYAHLFDDKVMKQLKRRRYTGWGRLSRKLINGIRDKQSGKTILDFLKSDGFANRNFMQLIHDDSLTFKEDIQKAQVSGQGDSLHEHIANLAGSPAIKKGILQTVKVVDELVKVMGRHKPENIVIEMARENQTTQKGQKNSRERMKRIEEGIKELGSQILKEHPVENTQLQNEKLYLYYLQNGRDMYVDQELDINRLSDYDVDHIVPQSFLKDDSIDNKVLTRSDKARGKSDNVPSEEVVKKMKNYWRQLLNAKLITQRKFDNLTKAERGGLSELDKAGFIKRQLVETRQITKHVAQILDSRMNTKYDENDKLIREVKVITLKSKLVSDFRKDFQFYKVREINNYHHAHDAYLNAVVGTALIKKYPKLESEFVYGDYKVYDVRKMIAKSEQEIGKATAKYFFYSNIMNFFKTEITLANGEIRKRPLIETNGETGEIVWDKGRDFATVRKVLSMPQVNIVKKTEVQTGGFSKESILPKRNSDKLIARKKDWDPKKYGGFDSPTVAYSVLVVAKVEKGKSKKLKSVKELLGITIMERSSFEKNPIDFLEAKGYKEVKKDLIIKLPKYSLFELENGRKRMLASAGELQKGNELALPSKYVNFLYLASHYEKLKGSPEDNEQKQLFVEQHKHYLDEIIEQISEFSKRVILADANLDKVLSAYNKHRDKPIREQAENIIHLFTLTNLGAPAAFKYFDTTIDRKRYTSTKEVLDATLIHQSITGLYETRIDLSQLGGDGGSGGSSGGSSGSETPGTSESATPESSGGSSGGSSGGTLNIEDEHRLHETSKEPDVSLGSTWLSDFPQAWAETGGMGLAVRQAPLIIPLKATSTPVSIKQYPMSQEARLGIKPHIQRLLDQGILVPCQSPWNTPLLPVKKPGTNDYRPVQDLREVNKRVEDIHPTVPNPYNLLSGLPPSHQWYTVLDLKDAFFCLRLHPTSQPLFAFEWRDPEMGISGQLTWTRLPQGFKNSPTLFDEALHRDLADFRIQHPDLILLQYVDDLLLAATSELDCQQGTRALLQTLGNLGYRASAKKAQICQKQVKYLGYLLKEGQRWLTEARKETVMGQPTPKTPRQLREFLGTAGFCRLWIPGFAEMAAPLYPLTKTGTLFNWGPDQQKAYQEIKQALLTAPALGLPDLTKPFELFVDEKQGYAKGVLTQKLGPWRRPVAYLSKKLDPVAAGWPPCLRMVAAIAVLTKDAGKLTMGQPLVILAPHAVEALVKQPPDRWLSNARMTHYQALLLDTDRVQFGPVVALNPATLLPLPEEGLQHNCLDILAEAHGTRPDLTDQPLPDADHTWYTDGSSLLQEGQRKAGAAVTTETEVIWAKALPAGTSAQRAELIALTQALKMAEGKKLNVYTDSRYAFATAHIHGEIYRRRGLLTSEGKEIKNKDEILALLKALFLPKRLSIIHCPGHQKGHSAEARGNRMADQAARKAAITETPDTSTLLAGKRTADGSEFEKRTADGSEFESPKKKAKVE

SEQ ID NO: 7732 - protein, 2118 aa, synthetic construct; identical to SEQ ID NO: 7731

SEQ ID NO: 7733 - protein, 2138 aa, synthetic construct
MPAAKRVKLDGGDKKYSIGLDIGTNSVGWAVITDEYKVPSKKFKVLGNTDRHSIKKNLIGALLFDSGETAEATRLKRTARRRYTRRKNRICYLQEIFSNEMAKVDDSFFHRLEESFLVEEDKKHERHPIFGNIVDEVAYHEKYPTIYHLRKKLVDSTDKADLRLIYLALAHMIKFRGHFLIEGDLNPDNSDVDKLFIQLVQTYNQLFEENPINASGVDAKAILSARLSKSRRLENLIAQLPGEKKNGLFGNLIALSLGLTPNFKSNFDLAEDAKLQLSKDTYDDDLDNLLAQIGDQYADLFLAAKNLSDAILLSDILRVNTEITKAPLSASMIKRYDEHHQDLTLLKALVRQQLPEKYKEIFFDQSKNGYAGYIDGGASQEEFYKFIKPILEKMDGTEELLVKLNREDLLRKQRTFDNGSIPHQIHLGELHAILRRQEDFYPFLKDNREKIEKILTFRIPYYVGPLARGNSRFAWMTRKSEETITPWNFEEVVDKGASAQSFIERMTNFDKNLPNEKVLPKHSLLYEYFTVYNELTKVKYVTEGMRKPAFLSGEQKKAIVDLLFKTNRKVTVKQLKEDYFKKIECFDSVEISGVEDRFNASLGTYHDLLKIIKDKDFLDNEENEDILEDIVLTLTLFEDREMIEERLKTYAHLFDDKVMKQLKRRRYTGWGRLSRKLINGIRDKQSGKTILDFLKSDGFANRNFMQLIHDDSLTFKEDIQKAQVSGQGDSLHEHIANLAGSPAIKKGILQTVKVVDELVKVMGRHKPENIVIEMARENQTTQKGQKNSRERMKRIEEGIKELGSQILKEHPVENTQLQNEKLYLYYLQNGRDMYVDQELDINRLSDYDVDHIVPQSFLKDDSIDNKVLTRSDKARGKSDNVPSEEVVKKMKNYWRQLLNAKLITQRKFDNLTKAERGGLSELDKAGFIKRQLVETRQITKHVAQILDSRMNTKYDENDKLIREVKVITLKSKLVSDFRKDFQFYKVREINNYHHAHDAYLNAVVGTALIKKYPKLESEFVYGDYKVYDVRKMIAKSEQEIGKATAKYFFYSNIMNFFKTEITLANGEIRKRPLIETNGETGEIVWDKGRDFATVRKVLSMPQVNIVKKTEVQTGGFSKESILPKRNSDKLIARKKDWDPKKYGGFDSPTVAYSVLVVAKVEKGKSKKLKSVKELLGITIMERSSFEKNPIDFLEAKGYKEVKKDLIIKLPKYSLFELENGRKRMLASAGELQKGNELALPSKYVNFLYLASHYEKLKGSPEDNEQKQLFVEQHKHYLDEIIEQISEFSKRVILADANLDKVLSAYNKHRDKPIREQAENIIHLFTLTNLGAPAAFKYFDTTIDRKRYTSTKEVLDATLIHQSITGLYETRIDLSQLGGDGGSGGSSGGSSGSETPGTSESATPESSGGSSGGSSGGWVQEISDSRPMLHIYLNGRRFLGLLNTGADKTCIAGRDWPANWPIHQTESSLQGLGMACGVARSSQPLRWQHEDKSGIIHPFVIPTLPFTLWGRDIMKDIKVRLMTDSPDDSQDLMIGAIESNLFADQISWKSDQPVWLNQWPLKQEKLQALQQLVTEQLQLGHLEESNSPWNTPVFVIKKKSGKWRLLQDLRAVNATMHDMGALQPGLPSPVAVPKGWEIIIIDLQDCFFNIKLHPEDCKRFAFSVPSPNFKRPYQRFQWKVLPQGMKNSPTLCQKFVDKAILTVRDKYQDSYIVHYMDDILLAHPSRSIVDEILTSMIQALNKHGLVVSTEKIQKYDNLKYLGTHIQGDSVSYQKLQIRTDKLRTLNDFQKLLGNINWIRPFLKLTTGELKPLFEILNGDSNPISTRKLTPEACKALQLMNERLSTARVKRLDLSQPWSLCILKTEYTPTACLWQDGVVEWIHLPHISPKVITPYDIFCTQLIIKGRHRSKELFSKDPDYIVVPYTKVQFDLLLQEKEDWPISLLGFLGEVHFHLPKDPLLTFTLQTAIIFPHMTSTTPLEKGIVIFTDGSANGRSVTYIQGREPIIKENTQNTAQQAEIVAVITAFEEVSQPFNLYTDSKYVTGLFPEIETATLSPRTKIYTELKHLQRLIHKRQEKFYIGHIRGHTGLPGPLAQGNAYADSLTRILTAGKRTADGSEFEKRTADGSEFESPKKKAKVE

SEQ ID NO: 7734 - protein, 2110 aa, synthetic construct
MPAAKRVKLDGGDKKYSIGLDIGTNSVGWAVITDEYKVPSKKFKVLGNTDRHSIKKNLIGALLFDSGETAEATRLKRTARRRYTRRKNRICYLQEIFSNEMAKVDDSFFHRLEESFLVEEDKKHERHPIFGNIVDEVAYHEKYPTIYHLRKKLVDSTDKADLRLIYLALAHMIKFRGHFLIEGDLNPDNSDVDKLFIQLVQTYNQLFEENPINASGVDAKAILSARLSKSRRLENLIAQLPGEKKNGLFGNLIALSLGLTPNFKSNFDLAEDAKLQLSKDTYDDDLDNLLAQIGDQYADLFLAAKNLSDAILLSDILRVNTEITKAPLSASMIKRYDEHHQDLTLLKALVRQQLPEKYKEIFFDQSKNGYAGYIDGGASQEEFYKFIKPILEKMDGTEELLVKLNREDLLRKQRTFDNGSIPHQIHLGELHAILRRQEDFYPFLKDNREKIEKILTFRIPYYVGPLARGNSRFAWMTRKSEETITPWNFEEVVDKGASAQSFIERMTNFDKNLPNEKVLPKHSLLYEYFTVYNELTKVKYVTEGMRKPAFLSGEQKKAIVDLLFKTNRKVTVKQLKEDYFKKIECFDSVEISGVEDRFNASLGTYHDLLKIIKDKDFLDNEENEDILEDIVLTLTLFEDREMIEERLKTYAHLFDDKVMKQLKRRRYTGWGRLSRKLINGIRDKQSGKTILDFLKSDGFANRNFMQLIHDDSLTFKEDIQKAQVSGQGDSLHEHIANLAGSPAIKKGILQTVKVVDELVKVMGRHKPENIVIEMARENQTTQKGQKNSRERMKRIEEGIKELGSQILKEHPVENTQLQNEKLYLYYLQNGRDMYVDQELDINRLSDYDVDHIVPQSFLKDDSIDNKVLTRSDKARGKSDNVPSEEVVKKMKNYWRQLLNAKLITQRKFDNLTKAERGGLSELDKAGFIKRQLVETRQITKHVAQILDSRMNTKYDENDKLIREVKVITLKSKLVSDFRKDFQFYKVREINNYHHAHDAYLNAVVGTALIKKYPKLESEFVYGDYKVYDVRKMIAKSEQEIGKATAKYFFYSNIMNFFKTEITLANGEIRKRPLIETNGETGEIVWDKGRDFATVRKVLSMPQVNIVKKTEVQTGGFSKESILPKRNSDKLIARKKDWDPKKYGGFDSPTVAYSVLVVAKVEKGKSKKLKSVKELLGITIMERSSFEKNPIDFLEAKGYKEVKKDLIIKLPKYSLFELENGRKRMLASAGELQKGNELALPSKYVNFLYLASHYEKLKGSPEDNEQKQLFVEQHKHYLDEIIEQISEFSKRVILADANLDKVLSAYNKHRDKPIREQAENIIHLFTLTNLGAPAAFKYFDTTIDRKRYTSTKEVLDATLIHQSITGLYETRIDLSQLGGDGGSGGSSGGSSGSETPGTSESATPESSGGSSGGSSGGLDDEYRLYSPLVKPDQNIQFWLEQFPQAWAETAGMGLAKQVPPQVIQLKASATPVSVRQYPLSKEAQEGIRPHVQRLIQQGILVPVQSPWNTPLLPVRKPGTNDYRPVQDLREVNKRVQDIHPTVPNPYNLLCALPPQRSWYTVLDLKDAFFCLRLHPTSQPLFAFEWRDPGTGRTGQLTWTRLPQGFKNSPTIFNEALHRDLANFRIQHPQVTLLQYVDDLLLAGATKQDCLEGTKALLLELSDLGYRASAKKAQICRREVTYLGYSLRDGQRWLTEARKKTVVQIPAPTTAKQVREFLGKAGFCRLFIPGFATLAAPLYPLTKPKGEFSWAPEHQKAFDAIKKALLSAPALALPDVTKPFTLYVDERKGVARGVLTQTLGPWRRPVAYLSKKLDPVASGWPVCLKAIAAVAILVKDADKLTLGQNITVIAPHALENIVRQPPDRWMTNARMTHYQSLLLTERVTFAPPAALNPATLLPEETDEPVTHDCHQLLIEETGVRKDLTDIPLTGEVLTWFTDGSSYVVEGKRMAGAAVVDGTRTIWASSLPEGTSAQKAELMALTQALRLAEGKSINIYTDSRYAFATAHVHGAIYKQRGWLTSAGREIKNKEEILSLLEALHLPKRLAIIHCPGHQKAKDPISRGNQMADRVAKQAAQGVNLLPAGKRTADGSEFEKRTADGSEFESPKKKAKVE

SEQ ID NO: 7735 - protein, 2110 aa, synthetic construct; identical to SEQ ID NO: 7734

SEQ ID NO: 7736 - protein, 2109 aa, synthetic construct
MPAAKRVKLDGGDKKYSIGLDIGTNSVGWAVITDEYKVPSKKFKVLGNTDRHSIKKNLIGALLFDSGETAEATRLKRTARRRYTRRKNRICYLQEIFSNEMAKVDDSFFHRLEESFLVEEDKKHERHPIFGNIVDEVAYHEKYPTIYHLRKKLVDSTDKADLRLIYLALAHMIKFRGHFLIEGDLNPDNSDVDKLFIQLVQTYNQLFEENPINASGVDAKAILSARLSKSRRLENLIAQLPGEKKNGLFGNLIALSLGLTPNFKSNFDLAEDAKLQLSKDTYDDDLDNLLAQIGDQYADLFLAAKNLSDAILLSDILRVNTEITKAPLSASMIKRYDEHHQDLTLLKALVRQQLPEKYKEIFFDQSKNGYAGYIDGGASQEEFYKFIKPILEKMDGTEELLVKLNREDLLRKQRTFDNGSIPHQIHLGELHAILRRQEDFYPFLKDNREKIEKILTFRIPYYVGPLARGNSRFAWMTRKSEETITPWNFEEVVDKGASAQSFIERMTNFDKNLPNEKVLPKHSLLYEYFTVYNELTKVKYVTEGMRKPAFLSGEQKKAIVDLLFKTNRKVTVKQLKEDYFKKIECFDSVEISGVEDRFNASLGTYHDLLKIIKDKDFLDNEENEDILEDIVLTLTLFEDREMIEERLKTYAHLFDDKVMKQLKRRRYTGWGRLSRKLINGIRDKQSGKTILDFLKSDGFANRNFMQLIHDDSLTFKEDIQKAQVSGQGDSLHEHIANLAGSPAIKKGILQTVKVVDELVKVMGRHKPENIVIEMARENQTTQKGQKNSRERMKRIEEGIKELGSQILKEHPVENTQLQNEKLYLYYLQNGRDMYVDQELDINRLSDYDVDHIVPQSFLKDDSIDNKVLTRSDKARGKSDNVPSEEVVKKMKNYWRQLLNAKLITQRKFDNLTKAERGGLSELDKAGFIKRQLVETRQITKHVAQILDSRMNTKYDENDKLIREVKVITLKSKLVSDFRKDFQFYKVREINNYHHAHDAYLNAVVGTALIKKYPKLESEFVYGDYKVYDVRKMIAKSEQEIGKATAKYFFYSNIMNFFKTEITLANGEIRKRPLIETNGETGEIVWDKGRDFATVRKVLSMPQVNIVKKTEVQTGGFSKESILPKRNSDKLIARKKDWDPKKYGGFDSPTVAYSVLVVAKVEKGKSKKLKSVKELLGITIMERSSFEKNPIDFLEAKGYKEVKKDLIIKLPKYSLFELENGRKRMLASAGELQKGNELALPSKYVNFLYLASHYEKLKGSPEDNEQKQLFVEQHKHYLDEIIEQISEFSKRVILADANLDKVLSAYNKHRDKPIREQAENIIHLFTLTNLGAPAAFKYFDTTIDRKRYTSTKEVLDATLIHQSITGLYETRIDLSQLGGDGGSGGSSGGSSGSETPGTSESATPESSGGSSGGSSGGVPWLMKKPLQLTVLVPLHEYQERLLQQTALPKEQKELLQKLFLKYDALWQHWENQVGHRRIKPHNIATGTLAPRPQKQYPINPKAKPSIQIVIDDLLKQGVLIQQNSTMNTPVYPVPKPDGKWRMVLDYREVNKTIPLIAAQNQHSAGILSSIYRGKYKTTLDLTNGFWAHPITPESYWLTAFTWQGKQYCWTRLPQGFLNSPALFTADVVDLLKEIPNVQAYVDDIYISHDDPQEHLEQLEKIFSILLNAGYVVSLKKSEIAQREVEFLGFNITKEGRGLTDTFKQKLLNITPPKDLKQLQSILGLLNFARNFIPNYSELVKPLYTIVANANGKFISWTEDNSNQLQHIISVLNQADNLEERNPETRLIIKVNSSPSAGYIRYYNEGSKRPIMYVNYIFSKAEAKFTQTEKLLTTMHKGLIKAMDLAMGQEILVYSPIVSMTKIQRTPLPERKALPVRWITWMTYLEDPRIQFHYDKSLPELQQIPNVTEDVIAKTKHPSEFAMVFYTDGSAIKHPDVNKSHSAGMGIAQVQFIPEYKIVHQWSIPLGDHTAQLAEIAAVEFACKKALKISGPVLIVTDSFYVAESANKELPYWKSNGFLNNKKKPLRHVSKWKSIAECLQLKPDIIIMHEKGHQQPMTTLHTEGNNLADKLATQGSYVVHAGKRTADGSEFEKRTADGSEFESPKKKAKVE

SEQ ID NO: 7737 - protein, 2109 aa, synthetic construct
MPAAKRVKLDGGDKKYSIGLDIGTNSVGWAVITDEYKVPSKKFKVLGNTDRHSIKKNLIGALLFDSGETAEATRLKRTARRRYTRRKNRICYLQEIFSNEMAKVDDSFFHRLEESFLVEEDKKHERHPIFGNIVDEVAYHEKYPTIYHLRKKLVDSTDKADLRLIYLALAHMIKFRGHFLIEGDLNPDNSDVDKLFIQLVQTYNQLFEENPINASGVDAKAILSARLSKSRRLENLIAQLPGEKKNGLFGNLIALSLGLTPNFKSNFDLAEDAKLQLSKDTYDDDLDNLLAQIGDQYADLFLAAKNLSDAILLSDILRVNTEITKAPLSASMIKRYDEHHQDLTLLKALVRQQLPEKYKEIFFDQSKNGYAGYIDGGASQEEFYKFIKPILEKMDGTEELLVKLNREDLLRKQRTFDNGSIPHQIHLGELHAILRRQEDFYPFLKDNREKIEKILTFRIPYYVGPLARGNSRFAWMTRKSEETITPWNFEEVVDKGASAQSFIERMTNFDKNLPNEKVLPKHSLLYEYFTVYNELTKVKYVTEGMRKPAFLSGEQKKAIVDLLFKTNRKVTVKQLKEDYFKKIECFDSVEISGVEDRFNASLGTYHDLLKIIKDKDFLDNEENEDILEDIVLTLTLFEDREMIEERLKTYAHLFDDKVMKQLKRRRYTGWGRLSRKLINGIRDKQSGKTILDFLKSDGFANRNFMQLIHDDSLTFKEDIQKAQVSGQGDSLHEHIANLAGSPAIKKGILQTVKVVDELVKVMGRHKPENIVIEMARENQTTQKGQKNSRERMKRIEEGIKELGSQILKEHPVENTQLQNEKLYLYYLQNGRDMYVDQELDINRLSDYDVDHIVPQSFLKDDSIDNKVLTRSDKARGKSDNVPSEEVVKKMKNYWRQLLNAKLITQRKFDNLTKAERGGLSELDKAGFIKRQLVETRQITKHVAQILDSRMNTKYDENDKLIREVKVITLKSKLVSDFRKDFQFYKVREINNYHHAHDAYLNAVVGTALIKKYPKLESEFVYGDYKVYDVRKMIAKSEQEIGKATAKYFFYSNIMNFFKTEITLANGEIRKRPLIETNGETGEIVWDKGRDFATVRKVLSMPQVNIVKKTEVQTGGFSKESILPKRNSDKLIARKKDWDPKKYGGFDSPTVAYSVLVVAKVEKGKSKKLKSVKELLGITIMERSSFEKNPIDFLEAKGYKEVKKDLIIKLPKYSLFELENGRKRMLASAGELQKGNELALPSKYVNFLYLASHYEKLKGSPEDNEQKQLFVEQHKHYLDEIIEQISEFSKRVILADANLDKVLSAYNKHRDKPIREQAENIIHLFTLTNLGAPAAFKYFDTTIDRKRYTSTKEVLDATLIHQSITGLYETRIDLSQLGGDGGSGGSSGGSSGSETPGTSESATPESSGGSSGGSSGGVPWLMKKPLQLTVLVPLHEYQERLLQQTALPKEQKELLQKLFLKYDALWQHWENQVGHRRIKPHNIATGTLAPRPQKQYPINPKAKPSIQIVIDDLLKQGVLIQQNSTMNTPVYPVPKPDGKWRMVLDYREVNKTIPLIAAQNQHSAGILSSIYRGKYKTTLDLTNGFWAHPITPESYWLTAFTWQGKQYCWTRLPQGFLNSPALFNADVVDLLKEIPNVQAYVDDIYISHDDPQEHLEQLEKIFSILLNAGYVVSLKKSEIAQREVEFLGFNITKEGRGLTDTFKQKLLNITPPKDLKQLQSILGLLNFARNFIPNYSELVKPLYTIVAPANGKFISWTEDNSNQLQHIISVLNQADNLEERNPETRLIIKVNSSPSAGYIRYYNEGSKRPIMYVNYIFSKAEAKFTQTEKLLTTMHKGLIKAMDLAMGQEILVYSPIVSMTKIQRTPLPERKALPVRWITWMTYLEDPRIQFHYDKSLPELQQIPNVTEDVIAKTKHPSEFAMVFYTDGSAIKHPDVNKSHSAGMGIAQVQFIPEYKIVHQWSIPLGDHTAQLAEIAAVEFACKKALKISGPVLIVTDSFYVAESANKELPYWKSNGFLNNKKKPLRHVSKWKSIAECLQLKPDIIIMHEKGHQQPMTTLHTEGNNLADKLATQGSYVVHAGKRTADGSEFEKRTADGSEFESPKKKAKVE

SEQ ID NO: 7738 - protein, 2198 aa, synthetic construct
MPAAKRVKLDGGDKKYSIGLDIGTNSVGWAVITDEYKVPSKKFKVLGNTDRHSIKKNLIGALLFDSGETAEATRLKRTARRRYTRRKNRICYLQEIFSNEMAKVDDSFFHRLEESFLVEEDKKHERHPIFGNIVDEVAYHEKYPTIYHLRKKLVDSTDKADLRLIYLALAHMIKFRGHFLIEGDLNPDNSDVDKLFIQLVQTYNQLFEENPINASGVDAKAILSARLSKSRRLENLIAQLPGEKKNGLFGNLIALSLGLTPNFKSNFDLAEDAKLQLSKDTYDDDLDNLLAQIGDQYADLFLAAKNLSDAILLSDILRVNTEITKAPLSASMIKRYDEHHQDLTLLKALVRQQLPEKYKEIFFDQSKNGYAGYIDGGASQEEFYKFIKPILEKMDGTEELLVKLNREDLLRKQRTFDNGSIPHQIHLGELHAILRRQEDFYPFLKDNREKIEKILTFRIPYYVGPLARGNSRFAWMTRKSEETITPWNFEEVVDKGASAQSFIERMTNFDKNLPNEKVLPKHSLLYEYFTVYNELTKVKYVTEGMRKPAFLSGEQKKAIVDLLFKTNRKVTVKQLKEDYFKKIECFDSVEISGVEDRFNASLGTYHDLLKIIKDKDFLDNEENEDILEDIVLTLTLFEDREMIEERLKTYAHLFDDKVMKQLKRRRYTGWGRLSRKLINGIRDKQSGKTILDFLKSDGFANRNFMQLIHDDSLTFKEDIQKAQVSGQGDSLHEHIANLAGSPAIKKGILQTVKVVDELVKVMGRHKPENIVIEMARENQTTQKGQKNSRERMKRIEEGIKELGSQILKEHPVENTQLQNEKLYLYYLQNGRDMYVDQELDINRLSDYDVDHIVPQSFLKDDSIDNKVLTRSDKARGKSDNVPSEEVVKKMKNYWRQLLNAKLITQRKFDNLTKAERGGLSELDKAGFIKRQLVETRQITKHVAQILDSRMNTKYDENDKLIREVKVITLKSKLVSDFRKDFQFYKVREINNYHHAHDAYLNAVVGTALIKKYPKLESEFVYGDYKVYDVRKMIAKSEQEIGKATAKYFFYSNIMNFFKTEITLANGEIRKRPLIETNGETGEIVWDKGRDFATVRKVLSMPQVNIVKKTEVQTGGFSKESILPKRNSDKLIARKKDWDPKKYGGFDSPTVAYSVLVVAKVEKGKSKKLKSVKELLGITIMERSSFEKNPIDFLEAKGYKEVKKDLIIKLPKYSLFELENGRKRMLASAGELQKGNELALPSKYVNFLYLASHYEKLKGSPEDNEQKQLFVEQHKHYLDEIIEQISEFSKRVILADANLDKVLSAYNKHRDKPIREQAENIIHLFTLTNLGAPAAFKYFDTTIDRKRYTSTKEVLDATLIHQSITGLYETRIDLSQLGGDGGSGGSSGGSSGSETPGTSESATPESSGGSSGGSSGGMDPLQLLQPLEAEIKGTKLKAHWNSGATITCVPEAFLEDERPIQTMLIKTIHGEKQQDVYYLTFKVQGRKVEAEVLASPYDYILLNPSDVPWLMKKPLQLTVLVPLHEYQERLLQQTALPKEQKELLQKLFLKYDALWQHWENQVGHRRIKPHNIATGTLAPRPQKQYPINPKAKPSIQIVIDDLLKQGVLIQQNSTMNTPVYPVPKPDGKWRMVLDYREVNKTIPLIAAQNQHSAGILSSIYRGKYKTTLDLTNGFWAHPITPESYWLTAFTWQGKQYCWTRLPQGFLNSPALFNADVVDLLKEIPNVQAYVDDIYISHDDPQEHLEQLEKIFSILLNAGYVVSLKKSEIAQREVEFLGFNITKEGRGLTDTFKQKLLNITPPKDLKQLQSILGKLNFARNFIPNYSELVKPLYTIVAPANGKFISWTEDNSNQLQHIISVLNQADNLEERNPETRLIIKVNSSPSAGYIRYYNEGSKRPIMYVNYIFSKAEAKFTQTEKLLTTMHKGLIKAMDLAMGQEILVYSPIVSMTKIQRTPLPERKALPVRWITWMTYLEDPRIQFHYDKSLPELQQIPNVTEDVIAKTKHPSEFAMVFYTDGSAIKHPDVNKSHSAGMGIAQVQFIPEYKIVHQWSIPLGDHTAQLAEIAAVEFACKKALKISGPVLIVTDSFYVAESANKELPYWKSNGFLNNKKKPLRHVSKWKSIAECLQLKPDIIIMHEKGHQQPMTTLHTEGNNLADKLATQGSYVVHAGKRTADGSEFEKRTADGSEFESPKKKAKVE

SEQ ID NO: 7739 - protein, 2109 aa, synthetic construct
MPAAKRVKLDGGDKKYSIGLDIGTNSVGWAVITDEYKVPSKKFKVLGNTDRHSIKKNLIGALLFDSGETAEATRLKRTARRRYTRRKNRICYLQEIFSNEMAKVDDSFFHRLEESFLVEEDKKHERHPIFGNIVDEVAYHEKYPTIYHLRKKLVDSTDKADLRLIYLALAHMIKFRGHFLIEGDLNPDNSDVDKLFIQLVQTYNQLFEENPINASGVDAKAILSARLSKSRRLENLIAQLPGEKKNGLFGNLIALSLGLTPNFKSNFDLAEDAKLQLSKDTYDDDLDNLLAQIGDQYADLFLAAKNLSDAILLSDILRVNTEITKAPLSASMIKRYDEHHQDLTLLKALVRQQLPEKYKEIFFDQSKNGYAGYIDGGASQEEFYKFIKPILEKMDGTEELLVKLNREDLLRKQRTFDNGSIPHQIHLGELHAILRRQEDFYPFLKDNREKIEKILTFRIPYYVGPLARGNSRFAWMTRKSEETITPWNFEEVVDKGASAQSFIERMTNFDKNLPNEKVLPKHSLLYEYFTVYNELTKVKYVTEGMRKPAFLSGEQKKAIVDLLFKTNRKVTVKQLKEDYFKKIECFDSVEISGVEDRFNASLGTYHDLLKIIKDKDFLDNEENEDILEDIVLTLTLFEDREMIEERLKTYAHLFDDKVMKQLKRRRYTGWGRLSRKLINGIRDKQSGKTILDFLKSDGFANRNFMQLIHDDSLTFKEDIQKAQVSGQGDSLHEHIANLAGSPAIKKGILQTVKVVDELVKVMGRHKPENIVIEMARENQTTQKGQKNSRERMKRIEEGIKELGSQILKEHPVENTQLQNEKLYLYYLQNGRDMYVDQELDINRLSDYDVDHIVPQSFLKDDSIDNKVLTRSDKARGKSDNVPSEEVVKKMKNYWRQLLNAKLITQRKFDNLTKAERGGLSELDKAGFIKRQLVETRQITKHVAQILDSRMNTKYDENDKLIREVKVITLKSKLVSDFRKDFQFYKVREINNYHHAHDAYLNAVVGTALIKKYPKLESEFVYGDYKVYDVRKMIAKSEQEIGKATAKYFFYSNIMNFFKTEITLANGEIRKRPLIETNGETGEIVWDKGRDFATVRKVLSMPQVNIVKKTEVQTGGFSKESILPKRNSDKLIARKKDWDPKKYGGFDSPTVAYSVLVVAKVEKGKSKKLKSVKELLGITIMERSSFEKNPIDFLEAKGYKEVKKDLIIKLPKYSLFELENGRKRMLASAGELQKGNELALPSKYVNFLYLASHYEKLKGSPEDNEQKQLFVEQHKHYLDEIIEQISEFSKRVILADANLDKVLSAYNKHRDKPIREQAENIIHLFTLTNLGAPAAFKYFDTTIDRKRYTSTKEVLDATLIHQSITGLYETRIDLSQLGGDGGSGGSSGGSSGSETPGTSESATPESSGGSSGGSSGGIPWLMKKPLQLTTLVPLQEYEERLLKQTMLTGSYKEKLQSLFLKYDALWQHWENQVGHRRIKPHHIATGTVNPRPQKQYPINPKAKASIQTVINDLLKQGVLIQQNSIMNTPVYPVPKPDGKWRMVLDYREVNKTIPLIAAQNQHSAGILSSIFRGKYKTTLDLSNGFWAHSITPESYWLTAFTWLGQQYCWTRLPQGFLNSPALFNADVVDLLKEVPNVQVYVDDIYISHDDPREHLEQLEKVFSLLLNAGYVVSLKKSEIAQHEVEFLGFNITKEGRGLTETFKQKLLNITPPRDLKQLQSILGLLNFARNFIPNFSELVKPLYNIIATAPGKYITWTTDNSQQLQNIISMLNSAENLEERNPEVRLIMKVNTSPSAGYIRFYNEFAKRPIMYLNYVYTKAEVKFTNTEKLLTTIHKGLIKALDLGMGQEILVYSPIVSMTKIQKTPLPERKALPIRWITWMSYLEDPRIQFHYDKTLPELQQVPTVTDDIIAKIKHPSEFSMVFYTDGSAIKHPNVNKSHNAGMGIAQVQFKPEFTVINTWSIPLGDHTAQLAEVAAVEFACKKALKIDGPVLIVTDSFYVAESVNKELPYWQSNGFFNNKKKPLKHVSKWKSIADCIQLKPDIIIIHEKGHQPTASTFHTEGNNLADKLATQGSYVVNAGKRTADGSEFEKRTADGSEFESPKKKAKVE

SEQ ID NO: 7740 - protein, 2198 aa, synthetic construct
MPAAKRVKLDGGDKKYSIGLDIGTNSVGWAVITDEYKVPSKKFKVLGNTDRHSIKKNLIGALLFDSGETAEATRLKRTARRRYTRRKNRICYLQEIFSNEMAKVDDSFFHRLEESFLVEEDKKHERHPIFGNIVDEVAYHEKYPTIYHLRKKLVDSTDKADLRLIYLALAHMIKFRGHFLIEGDLNPDNSDVDKLFIQLVQTYNQLFEENPINASGVDAKAILSARLSKSRRLENLIAQLPGEKKNGLFGNLIALSLGLTPNFKSNFDLAEDAKLQLSKDTYDDDLDNLLAQIGDQYADLFLAAKNLSDAILLSDILRVNTEITKAPLSASMIKRYDEHHQDLTLLKALVRQQLPEKYKEIFFDQSKNGYAGYIDGGASQEEFYKFIKPILEKMDGTEELLVKLNREDLLRKQRTFDNGSIPHQIHLGELHAILRRQEDFYPFLKDNREKIEKILTFRIPYYVGPLARGNSRFAWMTRKSEETITPWNFEEVVDKGASAQSFIERMTNFDKNLPNEKVLPKHSLLYEYFTVYNELTKVKYVTEGMRKPAFLSGEQKKAIVDLLFKTNRKVTVKQLKEDYFKKIECFDSVEISGVEDRFNASLGTYHDLLKIIKDKDFLDNEENEDILEDIVLTLTLFEDREMIEERLKTYAHLFDDKVMKQLKRRRYTGWGRLSRKLINGIRDKQSGKTILDFLKSDGFANRNFMQLIHDDSLTFKEDIQKAQVSGQGDSLHEHIANLAGSPAIKKGILQTVKVVDELVKVMGRHKPENIVIEMARENQTTQKGQKNSRERMKRIEEGIKELGSQILKEHPVENTQLQNEKLYLYYLQNGRDMYVDQELDINRLSDYDVDHIVPQSFLKDDSIDNKVLTRSDKARGKSDNVPSEEVVKKMKNYWRQLLNAKLITQRKFDNLTKAERGGLSELDKAGFIKRQLVETRQITKHVAQILDSRMNTKYDENDKLIREVKVITLKSKLVSDFRKDFQFYKVREINNYHHAHDAYLNAVVGTALIKKYPKLESEFVYGDYKVYDVRKMIAKSEQEIGKATAKYFFYSNIMNFFKTEITLANGEIRKRPLIETNGETGEIVWDKGRDFATVRKVLSMPQVNIVKKTEVQTGGFSKESILPKRNSDKLIARKKDWDPKKYGGFDSPTVAYSVLVVAKVEKGKSKKLKSVKELLGITIMERSSFEKNPIDFLEAKGYKEVKKDLIIKLPKYSLFELENGRKRMLASAGELQKGNELALPSKYVNFLYLASHYEKLKGSPEDNEQKQLFVEQHKHYLDEIIEQISEFSKRVILADANLDKVLSAYNKHRDKPIREQAENIIHLFTLTNLGAPAAFKYFDTTIDRKRYTSTKEVLDATLIHQSITGLYETRIDLSQLGGDGGSGGSSGGSSGSETPGTSESATPESSGGSSGGSSGGMDPLQLLQPLEAEIKGTKLKAHWNSGATITCVPQAFLEEEVPIKNIWIKTIHGEKEQPVYYLTFKIQGRKVEAEVISSPYDYILVSPSDIPWLMKKPLQLTTLVPLQEYEERLLKQTMLTGSYKEKLQSLFLKYDALWQHWENQVGHRRIKPHHIATGTVNPRPQKQYPINPKAKASIQTVINDLLKQGVLIQQNSIMNTPVYPVPKPDGKWRMVLDYREVNKTIPLIAAQNQHSAGILSSIFRGKYKTTLDLSNGFWAHSITPESYWLTAFTWLGQQYCWTRLPQGFLNSPALFNADVVDLLKEVPNVQVYVDDIYISHDDPREHLEQLEKVFSLLLNAGYVVSLKKSEIAQHEVEFLGFNITKEGRGLTETFKQKLLNITPPRDLKQLQSILGLLNFARNFIPNFSELVKPLYNIIATAPGKYITWTTDNSQQLQNIISMLNSAENLEERNPEVRLIMKVNTSPSAGYIRFYNEFAKRPIMYLNYVYTKAEVKFTNTEKLLTTIHKGLIKALDLGMGQEILVYSPIVSMTKIQKTPLPERKALPIRWITWMSYLEDPRIQFHYDKTLPELQQVPTVTDDIIAKIKHPSEFSMVFYTDGSAIKHPNVNKSHNAGMGIAQVQFKPEFTVINTWSIPLGDHTAQLAEVAAVEFACKKALKIDGPVLIVTDSFYVAESVNKELPYWQSNGFFNNKKKPLKHVSKWKSIADCIQLKPDIIIIHEKGHQPTASTFHTEGNNLADKLATQGSYVVNAGKRTADGSEFEKRTADGSEFESPKKKAKVE

SEQ ID NO: 7741 - protein, 2116 aa, synthetic construct
MPAAKRVKLDGGDKKYSIGLDIGTNSVGWAVITDEYKVPSKKFKVLGNTDRHSIKKNLIGALLFDSGETAEATRLKRTARRRYTRRKNRICYLQEIFSNEMAKVDDSFFHRLEESFLVEEDKKHERHPIFGNIVDEVAYHEKYPTIYHLRKKLVDSTDKADLRLIYLALAHMIKFRGHFLIEGDLNPDNSDVDKLFIQLVQTYNQLFEENPINASGVDAKAILSARLSKSRRLENLIAQLPGEKKNGLFGNLIALSLGLTPNFKSNFDLAEDAKLQLSKDTYDDDLDNLLAQIGDQYADLFLAAKNLSDAILLSDILRVNTEITKAPLSASMIKRYDEHHQDLTLLKALVRQQLPEKYKEIFFDQSKNGYAGYIDGGASQEEFYKFIKPILEKMDGTEELLVKLNREDLLRKQRTFDNGSIPHQIHLGELHAILRRQEDFYPFLKDNREKIEKILTFRIPYYVGPLARGNSRFAWMTRKSEETITPWNFEEVVDKGASAQSFIERMTNFDKNLPNEKVLPKHSLLYEYFTVYNELTKVKYVTEGMRKPAFLSGEQKKAIVDLLFKTNRKVTVKQLKEDYFKKIECFDSVEISGVEDRFNASLGTYHDLLKIIKDKDFLDNEENEDILEDIVLTLTLFEDREMIEERLKTYAHLFDDKVMKQLKRRRYTGWGRLSRKLINGIRDKQSGKTILDFLKSDGFANRNFMQLIHDDSLTFKEDIQKAQVSGQGDSLHEHIANLAGSPAIKKGILQTVKVVDELVKVMGRHKPENIVIEMARENQTTQKGQKNSRERMKRIEEGIKELGSQILKEHPVENTQLQNEKLYLYYLQNGRDMYVDQELDINRLSDYDVDHIVPQSFLKDDSIDNKVLTRSDKARGKSDNVPSEEVVKKMKNYWRQLLNAKLITQRKFDNLTKAERGGLSELDKAGFIKRQLVETRQITKHVAQILDSRMNTKYDENDKLIREVKVITLKSKLVSDFRKDFQFYKVREINNYHHAHDAYLNAVVGTALIKKYPKLESEFVYGDYKVYDVRKMIAKSEQEIGKATAKYFFYSNIMNFFKTEITLANGEIRKRPLIETNGETGEIVWDKGRDFATVRKVLSMPQVNIVKKTEVQTGGFSKESILPKRNSDKLIARKKDWDPKKYGGFDSPTVAYSVLVVAKVEKGKSKKLKSVKELLGITIMERSSFEKNPIDFLEAKGYKEVKKDLIIKLPKYSLFELENGRKRMLASAGELQKGNELALPSKYVNFLYLASHYEKLKGSPEDNEQKQLFVEQHKHYLDEIIEQISEFSKRVILADANLDKVLSAYNKHRDKPIREQAENIIHLFTLTNLGAPAAFKYFDTTIDRKRYTSTKEVLDATLIHQSITGLYETRIDLSQLGGDGGSGGSSGGSSGSETPGTSESATPESSGGSSGGSSGGVLNLEEEYRLHEKPVPSSIDPSWLQLFPTVWAERAGMGLANQVPPVVVELRSGASPVAVRQYPMSKEAREGIRPHIQRFLDLGVLVPCQSPWNTPLLPVKKPGTNDYRPVQDLREINKRVQDIHPTVPNPYNLLSSLPPSHTWYSVLDLKDAFFCLKLHPNSQPLFAFEWRDPEKGNTGQLTWTRLPQGFKNSPTLFDEALHRDLAPFRALNPQVVLLQYVDDLLVAAPTYRDCKEGTQKLLQELSKLGYRVSAKKAQLCQKEVTYLGYLLKEGKRWLTPARKATVMKIPPPTTPRQVREFLGTAGFCRLWIPGFASLAAPLYPLTKESIPFIWTEEHQKAFDRIKEALLSAPALALPDLTKPFTLYVDERAGVARGVLTQTLGPWRRPVAYLSKKLDPVASGWPTCLKAVAAVALLLKDADKLTLGQNVTVIASHSLESIVRQPPDRWMTNARMTHYQSLLLNERVSFAPPAVLNPATLLPVESEATPVHRCSEILAEETGTRRDLKDQPLPGVPAWYTDGSSFIAEGKRRAGAAIVDGKRTVWASSLPEGTSAQKAELVALTQALRLAEGKDINIYTDSRYAFATAHIHGAIYKQRGLLTSAGKDIKNKEEILALLEAIHLPKRVAIIHCPGHQKGNDPVATGNRRADEAAKQAALSTRVLAETTKPAGKRTADGSEFEKRTADGSEFESPKKKAKVE

SEQ ID NO: 7742 - protein, 2116 aa, synthetic construct
MPAAKRVKLDGGDKKYSIGLDIGTNSVGWAVITDEYKVPSKKFKVLGNTDRHSIKKNLIGALLFDSGETAEATRLKRTARRRYTRRKNRICYLQEIFSNEMAKVDDSFFHRLEESFLVEEDKKHERHPIFGNIVDEVAYHEKYPTIYHLRKKLVDSTDKADLRLIYLALAHMIKFRGHFLIEGDLNPDNSDVDKLFIQLVQTYNQLFEENPINASGVDAKAILSARLSKSRRLENLIAQLPGEKKNGLFGNLIALSLGLTPNFKSNFDLAEDAKLQLSKDTYDDDLDNLLAQIGDQYADLFLAAKNLSDAILLSDILRVNTEITKAPLSASMIKRYDEHHQDLTLLKALVRQQLPEKYKEIFFDQSKNGYAGYIDGGASQEEFYKFIKPILEKMDGTEELLVKLNREDLLRKQRTFDNGSIPHQIHLGELHAILRRQEDFYPFLKDNREKIEKILTFRIPYYVGPLARGNSRFAWMTRKSEETITPWNFEEVVDKGASAQSFIERMTNFDKNLPNEKVLPKHSLLYEYFTVYNELTKVKYVTEGMRKPAFLSGEQKKAIVDLLFKTNRKVTVKQLKEDYFKKIECFDSVEISGVEDRFNASLGTYHDLLKIIKDKDFLDNEENEDILEDIVLTLTLFEDREMIEERLKTYAHLFDDKVMKQLKRRRYTGWGRLSRKLINGIRDKQSGKTILDFLKSDGFANRNFMQLIHDDSLTFKEDIQKAQVSGQGDSLHEHIANLAGSPAIKKGILQTVKVVDELVKVMGRHKPENIVIEMARENQTTQKGQKNSRERMKRIEEGIKELGSQILKEHPVENTQLQNEKLYLYYLQNGRDMYVDQELDINRLSDYDVDHIVPQSFLKDDSIDNKVLTRSDKARGKSDNVPSEEVVKKMKNYWRQLLNAKLITQRKFDNLTKAERGGLSELDKAGFIKRQLVETRQITKHVAQILDSRMNTKYDENDKLIREVKVITLKSKLVSDFRKDFQFYKVREINNYHHAHDAYLNAVVGTALIKKYPKLESEFVYGDYKVYDVRKMIAKSEQEIGKATAKYFFYSNIMNFFKTEITLANGEIRKRPLIETNGETGEIVWDKGRDFATVRKVLSMPQVNIVKKTEVQTGGFSKESILPKRNSDKLIARKKDWDPKKYGGFDSPTVAYSVLVVAKVEKGKSKKLKSVKELLGITIMERSSFEKNPIDFLEAKGYKEVKKDLIIKLPKYSLFELENGRKRMLASAGELQKGNELALPSKYVNFLYLASHYEKLKGSPEDNEQKQLFVEQHKHYLDEIIEQISEFSKRVILADANLDKVLSAYNKHRDKPIREQAENIIHLFTLTNLGAPAAFKYFDTTIDRKRYTSTKEVLDATLIHQSITGLYETRIDLSQLGGDGGSGGSSGGSSGSETPGTSESATPESSGGSSGGSSGGVLNLEEEYRLHEKPVPSSIDPSWLQLFPTVWAERAGMGLANQVPPVVVELRSGASPVAVRQYPMSKEAREGIRPHIQRFLDLGVLVPCQSPWNTPLLPVKKPGTNDYRPVQDLREINKRVQDIHPTVPNPYNLLSSLPPSHTWYSVLDLKDAFFCLKLHPNSQPLFAFEWRDPEKGNTGQLTWTRLPQGFKNSPTLFNEALHRDLAPFRALNPQVVLLQYVDDLLVAAPTYRDCKEGTQKLLQELSKLGYRVSAKKAQLCQKEVTYLGYLLKEGKRWLTPARKATVMKIPPPTTPRQVREFLGTAGFCRLWIPGFASLAAPLYPLTKPSIPFIWTEEHQKAFDRIKEALLSAPALALPDLTKPFTLYVDERAGVARGVLTQTLGPWRRPVAYLSKKLDPVASGWPTCLKAVAAVALLLKDADKLTLGQNVTVIASHSLESIVRQPPDRWMTNARMTHYQSLLLNERVSFAPPAVLNPATLLPVESEATPVHRCSEILAEETGTRRDLKDQPLPGVPAWYTDGSSFIAEGKRRAGAAIVDGKRTVWASSLPEGTSAQKAELVALTQALRLAEGKDINIYTDSRYAFATAHIHGAIYKQRGWLTSAGKDIKNKEEILALLEAIHLPKRVAIIHCPGHQKGNDPVATGNRRADEAAKQAALSTRVLAETTKPAGKRTADGSEFEKRTADGSEFESPKKKAKVE

SEQ ID NO: 7743 - protein, 2116 aa, synthetic construct
MPAAKRVKLDGGDKKYSIGLDIGTNSVGWAVITDEYKVPSKKFKVLGNTDRHSIKKNLIGALLFDSGETAEATRLKRTARRRYTRRKNRICYLQEIFSNEMAKVDDSFFHRLEESFLVEEDKKHERHPIFGNIVDEVAYHEKYPTIYHLRKKLVDSTDKADLRLIYLALAHMIKFRGHFLIEGDLNPDNSDVDKLFIQLVQTYNQLFEENPINASGVDAKAILSARLSKSRRLENLIAQLPGEKKNGLFGNLIALSLGLTPNFKSNFDLAEDAKLQLSKDTYDDDLDNLLAQIGDQYADLFLAAKNLSDAILLSDILRVNTEITKAPLSASMIKRYDEHHQDLTLLKALVRQQLPEKYKEIFFDQSKNGYAGYIDGGASQEEFYKFIKPILEKMDGTEELLVKLNREDLLRKQRTFDNGSIPHQIHLGELHAILRRQEDFYPFLKDNREKIEKILTFRIPYYVGPLARGNSRFAWMTRKSEETITPWNFEEVVDKGASAQSFIERMTNFDKNLPNEKVLPKHSLLYEYFTVYNELTKVKYVTEGMRKPAFLSGEQKKAIVDLLFKTNRKVTVKQLKEDYFKKIECFDSVEISGVEDRFNASLGTYHDLLKIIKDKDFLDNEENEDILEDIVLTLTLFEDREMIEERLKTYAHLFDDKVMKQLKRRRYTGWGRLSRKLINGIRDKQSGKTILDFLKSDGFANRNFMQLIHDDSLTFKEDIQKAQVSGQGDSLHEHIANLAGSPAIKKGILQTVKVVDELVKVMGRHKPENIVIEMARENQTTQKGQKNSRERMKRIEEGIKELGSQILKEHPVENTQLQNEKLYLYYLQNGRDMYVDQELDINRLSDYDVDHIVPQSFLKDDSIDNKVLTRSDKARGKSDNVPSEEVVKKMKNYWRQLLNAKLITQRKFDNLTKAERGGLSELDKAGFIKRQLVETRQITKHVAQILDSRMNTKYDENDKLIREVKVITLKSKLVSDFRKDFQFYKVREINNYHHAHDAYLNAVVGTALIKKYPKLESEFVYGDYKVYDVRKMIAKSEQEIGKATAKYFFYSNIMNFFKTEITLANGEIRKRPLIETNGETGEIVWDKGRDFATVRKVLSMPQVNIVKKTEVQTGGFSKESILPKRNSDKLIARKKDWDPKKYGGFDSPTVAYSVLVVAKVEKGKSKKLKSVKELLGITIMERSSFEKNPIDFLEAKGYKEVKKDLIIKLPKYSLFELENGRKRMLASAGELQKGNELALPSKYVNFLYLASHYEKLKGSPEDNEQKQLFVEQHKHYLDEIIEQISEFSKRVILADANLDKVLSAYNKHRDKPIREQAENIIHLFTLTNLGAPAAFKYFDTTIDRKRYTSTKEVLDATLIHQSITGLYETRIDLSQLGGDGGSGGSSGGSSGSETPGTSESATPESSGGSSGGSSGGVLNLEEEYRLHEKPVPSSIDPSWLQLFPTVWAERAGMGLANQVPPVVVELRSGASPVAVRQYPMSKEAREGIRPHIQRFLDLGVLVPCQSPWNTPLLPVKKPGTNDYRPVQDLREINKRVQDIHPTVPNPYNLLSSLPPSHTWYSVLDLKDAFFCLKLHPNSQPLFAFEWRDPEKGNTGQLTWTRLPQGFKNSPTLFNEALHRDLAPFRALNPQVVLLQYVDDLLVAAPTYRDCKEGTQKLLQELSKLGYRVSAKKAQLCQKEVTYLGYLLKEGKRWLTPARKATVMKIPPPTTPRQVREFLGKAGFCRLFIPGFASLAAPLYPLTKPSIPFIWTEEHQKAFDRIKEALLSAPALALPDLTKPFTLYVDERAGVARGVLTQTLGPWRRPVAYLSKKLDPVASGWPTCLKAVAAVALLLKDADKLTLGQNVTVIASHSLESIVRQPPDRWMTNARMTHYQSLLLNERVSFAPPAVLNPATLLPVESEATPVHRCSEILAEETGTRRDLKDQPLPGVPAWYTDGSSFIAEGKRRAGAAIVDGKRTVWASSLPEGTSAQKAELVALTQALRLAEGKDINIYTDSRYAFATAHIHGAIYKQRGWLTSAGKDIKNKEEILALLEAIHLPKRVAIIHCPGHQKGNDPVATGNRRADEAAKQAALSTRVLAETTKPAGKRTADGSEFEKRTADGSEFESPKKKAKVE

SEQ ID NO: 7744-8000 - skipped (257 entries)

SEQ ID NO: 8001 - protein, 673 aa, Reticuloendotheliosis virus
TAPLEEEYRLFLEAPIQNVTLLEQWKREIPKVWAEINPPGLASTQAPIHVQLLSTALPVRVRQYPITLEAKRSLRETIRKFRAAGILRPVHSPWNTPLLPVRKSGTSEYRMVQDLREVNKRVETIHPTVPNPYTLLSLLPPDRIWYSVLDLKDAFFCIPLAPESQLIFAFEWADAEEGESGQLTWTRLPQGFKNSPTLFDEALNRDLQGFRLDHPSVSLLQYVDDLLIAADTQAACLSATRDLLMTLAELGYRVSGKKAQLCQEEVTYLGFKIHKGSRSLSNSRTQAILQIPVPKTKRQVREFLGTIGYCRLWIPGFAELAQPLYAATRGGNDPLVWGEKEEEAFQSLKLALTQPPALALPSLDKPFQLFVEETSGAAKGVLTQALGPWKRPVAYLSKRLDPVAAGWPRCLRAIAAAALLTREASKLTFGQDIEITSSHNLESLLRSPPDKWLTNARITQYQVLLLDPPRVRFKQTAALNPATLLPETDDTLPIHHCLDTLDSLTSTRPDLTDQPLAQAEATLFTDGSSYIRDGKRYAGAAVVTLDSVIWAEPLPIGTSAQKAELIALTKALEWSKDKSVNIYTDSRYAFATLHVHGMIYRERGLLTAGGKAIKNAPEILALLTAVWLPKRVAVMHCKGHQKDDAPTSTGNRRADEVAREVAIRPLSTQATIS

SEQ ID NO: 8002 - protein, 673 aa, synthetic construct
TAPLEEEYRLFLEAPIQNVTLLEQWKREIPKVWAEINPPGLASTQAPIHVQLLSTALPVRVRQYPITLEAKRSLRETIRKFRAAGILRPVHSPWNTPLLPVRKSGTSEYRMVQDLREVNKRVETIHPTVPNPYTLLSLLPPDRIWYSVLDLKDAFFCIPLAPESQLIFAFEWADAEEGESGQLTWTRLPQGFKNSPTLFNEALNRDLQGFRLDHPSVSLLQYVDDLLIAADTQAACLSATRDLLMTLAELGYRVSGKKAQLCQEEVTYLGFKIHKGSRSLSNSRTQAILQIPVPKTKRQVREFLGTIGYCRLWIPGFAELAQPLYAATRPGNDPLVWGEKEEEAFQSLKLALTQPPALALPSLDKPFQLFVEETSGAAKGVLTQALGPWKRPVAYLSKRLDPVAAGWPRCLRAIAAAALLTREASKLTFGQDIEITSSHNLESLLRSPPDKWLTNARITQYQVLLLDPPRVRFKQTAALNPATLLPETDDTLPIHHCLDTLDSLTSTRPDLTDQPLAQAEATLFTDGSSYIRDGKRYAGAAVVTLDSVIWAEPLPIGTSAQKAELIALTKALEWSKDKSVNIYTDSRYAFATLHVHGMIYRERGWLTAGGKAIKNAPEILALLTAVWLPKRVAVMHCKGHQKDDAPTSTGNRRADEVAREVAIRPLSTQATIS

SEQ ID NO: 8003 - protein, 673 aa, synthetic construct
TAPLEEEYRLFLEAPIQNVTLLEQWKREIPKVWAEINPPGLASTQAPIHVQLLSTALPVRVRQYPITLEAKRSLRETIRKFRAAGILRPVHSPWNTPLLPVRKSGTSEYRMVQDLREVNKRVETIHPTVPNPYTLLSLLPPDRIWYSVLDLKDAFFCIPLAPESQLIFAFEWADAEEGESGQLTWTRLPQGFKNSPTLFNEALNRDLQGFRLDHPSVSLLQYVDDLLIAADTQAACLSATRDLLMTLAELGYRVSGKKAQLCQEEVTYLGFKIHKGSRSLSNSRTQAILQIPVPKTKRQVREFLGKIGYCRLFIPGFAELAQPLYAATRPGNDPLVWGEKEEEAFQSLKLALTQPPALALPSLDKPFQLFVEETSGAAKGVLTQALGPWKRPVAYLSKRLDPVAAGWPRCLRAIAAAALLTREASKLTFGQDIEITSSHNLESLLRSPPDKWLTNARITQYQVLLLDPPRVRFKQTAALNPATLLPETDDTLPIHHCLDTLDSLTSTRPDLTDQPLAQAEATLFTDGSSYIRDGKRYAGAAVVTLDSVIWAEPLPIGTSAQKAELIALTKALEWSKDKSVNIYTDSRYAFATLHVHGMIYRERGWLTAGGKAIKNAPEILALLTAVWLPKRVAVMHCKGHQKDDAPTSTGNRRADEVAREVAIRPLSTQATIS

SEQ ID NO: 8004 - protein, 677 aa, synthetic construct
TVSLQDEHRLFDIPVTTSLPDVWLQDFPQAWAETGGLGRAKCQAPIIIDLKPTAVPVSIKQYPMSLEAHMGIRQHIIKFLELGVLRPCRSPWNTPLLPVKKPGTQDYRPVQDLREINKRTVDIHPTVPNPYNLLSTLKPDYSWYTVLDLKDAFFCLPLAPQSQELFAFEWKDPERGISGQLTWTRLPQGFKNSPTLFDEALHRDLTDFRTQHPEVTLLQYVDDLLLAAPTKKACTQGTRHLLQELGEKGYRASAKKAQICQTKVTYLGYILSEGKRWLTPGRIETVARIPPPRNPREVREFLGTAGFCRLWIPGFAELAAPLYALTKESTPFTWQTEHQLAFEALKKALLSAPALGLPDTSKPFTLFLDERQGIAKGVLTQKLGPWKRPVAYLSKKLDPVAAGWPPCLRIMAATAMLVKDSAKLTLGQPLTVITPHTLEAIVRQPPDRWITNARLTHYQALLLDTDRVQFGPPVTLNPATLLPVPENQPSPHDCRQVLAETHGTREDLKDQELPDADHTWYTDGSSYLDSGTRRAGAAVVDGHNTIWAQSLPPGTSAQKAELIALTKALELSKGKKANIYTDSRYAFATAHTHGSIYERRGLLTSEGKEIKNKAEIIALLKALFLPQEVAIIHCPGHQKGQDPVAVGNRQADRVARQAAMAEVLTLATEPDNTSHIT

SEQ ID NO: 8005 - protein, 677 aa, synthetic construct
TVSLQDEHRLFDIPVTTSLPDVWLQDFPQAWAETGGLGRAKCQAPIIIDLKPTAVPVSIKQYPMSLEAHMGIRQHIIKFLELGVLRPCRSPWNTPLLPVKKPGTQDYRPVQDLREINKRTVDIHPTVPNPYNLLSTLKPDYSWYTVLDLKDAFFCLPLAPQSQELFAFEWKDPERGISGQLTWTRLPQGFKNSPTLFNEALHRDLTDFRTQHPEVTLLQYVDDLLLAAPTKKACTQGTRHLLQELGEKGYRASAKKAQICQTKVTYLGYILSEGKRWLTPGRIETVARIPPPRNPREVREFLGTAGFCRLWIPGFAELAAPLYALTKPSTPFTWQTEHQLAFEALKKALLSAPALGLPDTSKPFTLFLDERQGIAKGVLTQKLGPWKRPVAYLSKKLDPVAAGWPPCLRIMAATAMLVKDSAKLTLGQPLTVITPHTLEAIVRQPPDRWITNARLTHYQALLLDTDRVQFGPPVTLNPATLLPVPENQPSPHDCRQVLAETHGTREDLKDQELPDADHTWYTDGSSYLDSGTRRAGAAVVDGHNTIWAQSLPPGTSAQKAELIALTKALELSKGKKANIYTDSRYAFATAHTHGSIYERRGWLTSEGKEIKNKAEIIALLKALFLPQEVAIIHCPGHQKGQDPVAVGNRQADRVARQAAMAEVLTLATEPDNTSHIT

SEQ ID NO: 8006 - protein, 677 aa, synthetic construct
TVSLQDEHRLFDIPVTTSLPDVWLQDFPQAWAETGGLGRAKCQAPIIIDLKPTAVPVSIKQYPMSLEAHMGIRQHIIKFLELGVLRPCRSPWNTPLLPVKKPGTQDYRPVQDLREINKRTVDIHPTVPNPYNLLSTLKPDYSWYTVLDLKDAFFCLPLAPQSQELFAFEWKDPERGISGQLTWTRLPQGFKNSPTLFNEALHRDLTDFRTQHPEVTLLQYVDDLLLAAPTKKACTQGTRHLLQELGEKGYRASAKKAQICQTKVTYLGYILSEGKRWLTPGRIETVARIPPPRNPREVREFLGKAGFCRLFIPGFAELAAPLYALTKPSTPFTWQTEHQLAFEALKKALLSAPALGLPDTSKPFTLFLDERQGIAKGVLTQKLGPWKRPVAYLSKKLDPVAAGWPPCLRIMAATAMLVKDSAKLTLGQPLTVITPHTLEAIVRQPPDRWITNARLTHYQALLLDTDRVQFGPPVTLNPATLLPVPENQPSPHDCRQVLAETHGTREDLKDQELPDADHTWYTDGSSYLDSGTRRAGAAVVDGHNTIWAQSLPPGTSAQKAELIALTKALELSKGKKANIYTDSRYAFATAHTHGSIYERRGWLTSEGKEIKNKAEIIALLKALFLPQEVAIIHCPGHQKGQDPVAVGNRQADRVARQAAMAEVLTLATEPDNTSHIT

SEQ ID NO: 8007 - protein, 576 aa, Bovine leukemia virus
GVLDAPPSHIGLEHLPPPPEVPQFPLNLERLQALQDLVHRSLEAGYISPWDGPGNNPVFPVRKPNGAWRFVHDLRVTNALTKPIPALSPGPPDLTAIPTHLPHIICLDLKDAFFQIPVEDRFRSYFAFTLPTPGGLQPHRRFAWRVLPQGFINSPALFERALQEPLRQVSAAFSQSLLVSYMDDILYVSPTEEQRLQCYQTMAAHLRDLGFQVASEKTRQTPSPVPFLGQMVHERMVTYQSLPTLQISSPISLHQLQTVLGDLQWVSRGTPTTRRPLQLLYSSLKGIDDPRAIIHLSPEQQQGIAELRQALSHNARSRYNEQEPLLAYVHLTRAGSTLVLFQKGAQFPLAYFQTPLTDNQASPWGLLLLLGCQYLQAQALSSYAKTILKYYHNLPKTSLDNWIQSSEDPRVQELLQLWPQISSQGIQPPGPWKTLVTRAEVFLTPQFSPEPIPAALCLFSDGAARRGAYCLWKDHLLDFQAVPAPESAQKGELAGLLAGLAAAPPEPLNIWVDSKYLYSLLRTLVLGAWLQPDPVPSYALLYKSLLRHPAIFVGHVRSHSSASHPIASLNNYVDQL

SEQ ID NO: 8008 - protein, 576 aa, synthetic construct
GVLDAPPSHIGLEHLPPPPEVPQFPLNLERLQALQDLVHRSLEAGYISPWDGPGNNPVFPVRKPNGAWRFVHDLRVTNALTKPIPALSPGPPDLTAIPTHLPHIICLDLKDAFFQIPVEDRFRSYFAFTLPTPGGLQPHRRFAWRVLPQGFINSPALFQRALQEPLRQVSAAFSQSLLVSYMDDILYVSPTEEQRLQCYQTMAAHLRDLGFQVASEKTRQTPSPVPFLGQMVHERMVTYQSLPTLQISSPISLHQLQTVLGDLQWVSRGTPTTRRPLQLLYSSLKPIDDPRAIIHLSPEQQQGIAELRQALSHNARSRYNEQEPLLAYVHLTRAGSTLVLFQKGAQFPLAYFQTPLTDNQASPWGLLLLLGCQYLQAQALSSYAKTILKYYHNLPKTSLDNWIQSSEDPRVQELLQLWPQISSQGIQPPGPWKTLVTRAEVFLTPQFSPEPIPAALCLFSDGAARRGAYCLWKDHLLDFQAVPAPESAQKGELAGLLAGLAAAPPEPLNIWVDSKYLYSLLRTLVLGAWLQPDPVPSYALLYKSLLRHPAIFVGHVRSHSSASHPIASLNNYVDQL

SEQ ID NO: 8009 - protein, 576 aa, Bovine leukemia virus
GVLDTPPSHIGLEHLPPPPEVPQFPLNLERLQALQDLVHRSLEAGYISPWDGPGNNPVFPVRKPNGAWRFVHDLRATNALTKPIPALSPGPPDLTAIPTHPPHIICLDLKDAFFQIPVEDRFRFYLSFTLPSPGGLQPHRRFAWRVLPQGFINSPALFERALQEPLRQVSAAFSQSLLVSYMDDILYASPTEEQRSQCYQALAARLRDLGFQVASEKTSQTPSPVPFLGQMVHEQIVTYQSLPTLQISSPISLHQLQAVLGDLQWVSRGTPTTRRPLQLLYSSLKRHHDPRAIIQLSPEQLQGIAELRQALSHNARSRYNEQEPLLAYVHLTRAGSTLVLFQKGAQFPLAYFQTPLTDNQASPWGLLLLLGCQYLQTQALSSYAKPILKYYHNLPKTSLDNWIQSSEDPRVQELLQLWPQISSQGIQPPGPWKTLITRAEVFLTPQFSPDPIPAALCLFSDGATGRGAYCLWKDHLLDFQAVPAPESAQKGELAGLLAGLAAAPPEPVNIWVDSKYLYSLLRTLVLGAWLQPDPVPSYALLYKSLLRHPAIVVGHVRSHSSASHPIASLNNYVDQL

SEQ ID NO: 8010 - protein, 576 aa, synthetic construct
GVLDTPPSHIGLEHLPPPPEVPQFPLNLERLQALQDLVHRSLEAGYISPWDGPGNNPVFPVRKPNGAWRFVHDLRATNALTKPIPALSPGPPDLTAIPTHPPHIICLDLKDAFFQIPVEDRFRFYLSFTLPSPGGLQPHRRFAWRVLPQGFINSPALFNRALQEPLRQVSAAFSQSLLVSYMDDILYASPTEEQRSQCYQALAARLRDLGFQVASEKTSQTPSPVPFLGQMVHEQIVTYQSLPTLQISSPISLHQLQAVLGDLQWVSRGTPTTRRPLQLLYSSLKRHHDPRAIIQLSPEQLQGIAELRQALSHNARSRYNEQEPLLAYVHLTRAGSTLVLFQKGAQFPLAYFQTPLTDNQASPWGLLLLLGCQYLQTQALSSYAKPILKYYHNLPKTSLDNWIQSSEDPRVQELLQLWPQISSQGIQPPGPWKTLITRAEVFLTPQFSPDPIPAALCLFSDGATGRGAYCLWKDHLLDFQAVPAPESAQKGELAGLLAGLAAAPPEPVNIWVDSKYLYSLLRTWVLGAWLQPDPVPSYALLYKSLLRHPAIVVGHVRSHSSASHPIASLNNYVDQL

SEQ ID NO: 8011 - protein, 576 aa, synthetic construct
GVLDTPPSHIGLEHLPPPPEVPQFPLNLERLQALQDLVHRSLEAGYISPWDGPGNNPVFPVRKPNGAWRFVHDLRATNALTKPIPALSPGPPDLTAPPTHPPHIICLDLKDAFFQIPVEDRFRFYLSFTLPSPGGLQPHRRFAWRVLPQGFINSPALFQRALQEPLRQVSAAFSQSLLVSYMDDILYASPTEEQRSQCYQALAARLRDLGFQVASEKTSQTPSPVPFLGQMVHEQIVTYQSLPTLQISSPISLHQLQAVLGDLQWVSRGTPTTRRPLQLLYSSLKRHHDPRAIIQLSPEQLQGIAELRQALSHNARSRYNEQEPLLAYVHLTRAGSTLVLFQKGAQFPLAYFQTPLTDNQASPWGLLLLLGCQYLQTQALSSYAKPILKYYHNLPKTSLDNWIQSSEDPRVQELLQLWPQISSQGIQPPGPWKTLITRAEVFLTPQFSPDPIPAALCLFSDGATGRGAYCLWKDHLLDFQAVPAPESAQKGELAGLLAGLAAAPPEPVNIWVDSKYLYSLLRTWVLGAWLQPDPVPSYALLYKSLLRHPAIVVGHVRSHSSASHPIASLNNYVDQL

SEQ ID NO: 8012 - protein, 748 aa, Feline foamy virus
MDLLKPLTVERKGVKIKGYWNSQADITCVPKDLLQGEEPVRQQNVTTIHGTQEGDVYYVNLKIDGRRINTEVIGTTLDYAIITPGDVPWILKKPLELTIKLDLEEQQGTLLNNSILSKKGKEELKQLFEKYSALWQSWENQVGHRRIRPHKIATGTVKPTPQKQYHINPKAKPDIQIVINDLLKQGVLIQKESTMNTPVYPVPKPNGRWRMVLDYRAVNKVTPLIAVQNQHSYGILGSLFKGRYKTTIDLSNGFWAHPIVPEDYWITAFTWQGKQYCWTVLPQGFLNSPGLFTGDVVDLLQGIPNVEVYVDDVYISHDSEKEHLEYLDILFNRLKEAGYIISLKKSNIANSIVDFLGFQITNEGRGLTDTFKEKLENITAPTTLKQLQSILGLLNFARNFIPDFTELIAPLYALIPKSTKNYVPWQIEHSTTLETLITKLNGAEYLQGRKGDKTLIMKVNASYTTGYIRYYNEGEKKPISYVSIVFSKTELKFTELEKLLTTVHKGLLKALDLSMGQNIHVYSPIVSMQNIQKTPQTAKKALASRWLSWLSYLEDPRIRFFYDPQMPALKDLPAVDTGKDNKKHPSNFQHIFYTDGSAITSPTKEGHLNAGMGIVYFINKDGNLQKQQEWSISLGNHTAQFAEIAAFEFALKKCLPLGGNILVVTDSNYVAKAYNEELDVWASNGFVNNRKKPLKHISKWKSVADLKRLRPDVVVTHEPGHQKLDSSPHAYGNNLADQLATQASFKVH

SEQ ID NO: 8013 - protein, 748 aa, synthetic construct
MDLLKPLTVERKGVKIKGYWNSQADITCVPKDLLQGEEPVRQQNVTTIHGTQEGDVYYVNLKIDGRRINTEVIGTTLDYAIITPGDVPWILKKPLELTIKLDLEEQQGTLLNNSILSKKGKEELKQLFEKYSALWQSWENQVGHRRIRPHKIATGTVKPTPQKQYHINPKAKPDIQIVINDLLKQGVLIQKESTMNTPVYPVPKPNGRWRMVLDYRAVNKVTPLIAVQNQHSYGILGSLFKGRYKTTIDLSNGFWAHPIVPEDYWITAFTWQGKQYCWTVLPQGFLNSPGLFNGDVVDLLQGIPNVEVYVDDVYISHDSEKEHLEYLDILFNRLKEAGYIISLKKSNIANSIVDFLGFQITNEGRGLTDTFKEKLENITAPTTLKQLQSILGLLNFARNFIPDFTELIAPLYALIPKSPKNYVPWQIEHSTTLETLITKLNGAEYLQGRKGDKTLIMKVNASYTTGYIRYYNEGEKKPISYVSIVFSKTELKFTELEKLLTTVHKGLLKALDLSMGQNIHVYSPIVSMQNIQKTPQTAKKALASRWLSWLSYLEDPRIRFFYDPQMPALKDLPAVDTGKDNKKHPSNFQHIFYTDGSAITSPTKEGHLNAGMGIVYFINKDGNLQKQQEWSISLGNHTAQFAEIAAFEFALKKCLPLGGNILVVTDSNYVAKAYNEELDVWASNGFVNNRKKPLKHISKWKSVADLKRLRPDVVVTHEPGHQKLDSSPHAYGNNLADQLATQASFKVH

SEQ ID NO: 8014 - protein, 748 aa, synthetic construct
MDLLKPLTVERKGVKIKGYWNSQADITCVPKDLLQGEEPVRQQNVTTIHGTQEGDVYYVNLKIDGRRINTEVIGTTLDYAIITPGDVPWILKKPLELTIKLDLEEQQGTLLNNSILSKKGKEELKQLFEKYSALWQSWENQVGHRRIRPHKIATGTVKPTPQKQYHINPKAKPDIQIVINDLLKQGVLIQKESTMNTPVYPVPKPNGRWRMVLDYRAVNKVTPLIAVQNQHSYGILGSLFKGRYKTTIDLSNGFWAHPIVPEDYWITAFTWQGKQYCWTVLPQGFLNSPGLFNGDVVDLLQGIPNVEVYVDDVYISHDSEKEHLEYLDILFNRLKEAGYIISLKKSNIANSIVDFLGFQITNEGRGLTDTFKEKLENITAPTTLKQLQSILGKLNFARNFIPDFTELIAPLYALIPKSPKNYVPWQIEHSTTLETLITKLNGAEYLQGRKGDKTLIMKVNASYTTGYIRYYNEGEKKPISYVSIVFSKTELKFTELEKLLTTVHKGLLKALDLSMGQNIHVYSPIVSMQNIQKTPQTAKKALASRWLSWLSYLEDPRIRFFYDPQMPALKDLPAVDTGKDNKKHPSNFQHIFYTDGSAITSPTKEGHLNAGMGIVYFINKDGNLQKQQEWSISLGNHTAQFAEIAAFEFALKKCLPLGGNILVVTDSNYVAKAYNEELDVWASNGFVNNRKKPLKHISKWKSVADLKRLRPDVVVTHEPGHQKLDSSPHAYGNNLADQLATQASFKVH

SEQ ID NO: 8015 - protein, 662 aa, Feline foamy virus
VPWILKKPLELTIKLDLEEQQGTLLNNSILSKKGKEELKQLFEKYSALWQSWENQVGHRRIRPHKIATGTVKPTPQKQYHINPKAKPDIQIVINDLLKQGVLIQKESTMNTPVYPVPKPNGRWRMVLDYRAVNKVTPLIAVQNQHSYGILGSLFKGRYKTTIDLSNGFWAHPIVPEDYWITAFTWQGKQYCWTVLPQGFLNSPGLFTGDVVDLLQGIPNVEVYVDDVYISHDSEKEHLEYLDILFNRLKEAGYIISLKKSNIANSIVDFLGFQITNEGRGLTDTFKEKLENITAPTTLKQLQSILGLLNFARNFIPDFTELIAPLYALIPKSTKNYVPWQIEHSTTLETLITKLNGAEYLQGRKGDKTLIMKVNASYTTGYIRYYNEGEKKPISYVSIVFSKTELKFTELEKLLTTVHKGLLKALDLSMGQNIHVYSPIVSMQNIQKTPQTAKKALASRWLSWLSYLEDPRIRFFYDPQMPALKDLPAVDTGKDNKKHPSNFQHIFYTDGSAITSPTKEGHLNAGMGIVYFINKDGNLQKQQEWSISLGNHTAQFAEIAAFEFALKKCLPLGGNILVVTDSNYVAKAYNEELDVWASNGFVNNRKKPLKHISKWKSVADLKRLRPDVVVTHEPGHQKLDSSPHAYGNNLADQLATQASFKVH

SEQ ID NO: 8016 - protein, 662 aa, synthetic construct
VPWILKKPLELTIKLDLEEQQGTLLNNSILSKKGKEELKQLFEKYSALWQSWENQVGHRRIRPHKIATGTVKPTPQKQYHINPKAKPDIQIVINDLLKQGVLIQKESTMNTPVYPVPKPNGRWRMVLDYRAVNKVTPLIAVQNQHSYGILGSLFKGRYKTTIDLSNGFWAHPIVPEDYWITAFTWQGKQYCWTVLPQGFLNSPGLFNGDVVDLLQGIPNVEVYVDDVYISHDSEKEHLEYLDILFNRLKEAGYIISLKKSNIANSIVDFLGFQITNEGRGLTDTFKEKLENITAPTTLKQLQSILGLLNFARNFIPDFTELIAPLYALIPKSPKNYVPWQIEHSTTLETLITKLNGAEYLQGRKGDKTLIMKVNASYTTGYIRYYNEGEKKPISYVSIVFSKTELKFTELEKLLTTVHKGLLKALDLSMGQNIHVYSPIVSMQNIQKTPQTAKKALASRWLSWLSYLEDPRIRFFYDPQMPALKDLPAVDTGKDNKKHPSNFQHIFYTDGSAITSPTKEGHLNAGMGIVYFINKDGNLQKQQEWSISLGNHTAQFAEIAAFEFALKKCLPLGGNILVVTDSNYVAKAYNEELDVWASNGFVNNRKKPLKHISKWKSVADLKRLRPDVVVTHEPGHQKLDSSPHAYGNNLADQLATQASFKVH

SEQ ID NO: 8017 - protein, 662 aa, synthetic construct
VPWILKKPLELTIKLDLEEQQGTLLNNSILSKKGKEELKQLFEKYSALWQSWENQVGHRRIRPHKIATGTVKPTPQKQYHINPKAKPDIQIVINDLLKQGVLIQKESTMNTPVYPVPKPNGRWRMVLDYRAVNKVTPLIAVQNQHSYGILGSLFKGRYKTTIDLSNGFWAHPIVPEDYWITAFTWQGKQYCWTVLPQGFLNSPGLFNGDVVDLLQGIPNVEVYVDDVYISHDSEKEHLEYLDILFNRLKEAGYIISLKKSNIANSIVDFLGFQITNEGRGLTDTFKEKLENITAPTTLKQLQSILGKLNFARNFIPDFTELIAPLYALIPKSPKNYVPWQIEHSTTLETLITKLNGAEYLQGRKGDKTLIMKVNASYTTGYIRYYNEGEKKPISYVSIVFSKTELKFTELEKLLTTVHKGLLKALDLSMGQNIHVYSPIVSMQNIQKTPQTAKKALASRWLSWLSYLEDPRIRFFYDPQMPALKDLPAVDTGKDNKKHPSNFQHIFYTDGSAITSPTKEGHLNAGMGIVYFINKDGNLQKQQEWSISLGNHTAQFAEIAAFEFALKKCLPLGGNILVVTDSNYVAKAYNEELDVWASNGFVNNRKKPLKHISKWKSVADLKRLRPDVVVTHEPGHQKLDSSPHAYGNNLADQLATQASFKVH

SEQ ID NO: 8018 - protein, 670 aa, Feline leukemia virus
TLQLEEEYRLFEPESTQKQEMDIWLKNFPQAWAETGGMGTAHCQAPVLIQLKATATPISIRQYPMPHEAYQGIKPHIRRMLDQGILKPCQSPWNTPLLPVKKPGTEDYRPVQDLREVNKRVEDIHPTVPNPYNLLSTLPPSHPWYTVLDLKDAFFCLRLHSESQLLFAFEWRDPEIGLSGQLTWTRLPQGFKNSPTLFDEALHSDLADFRVRYPALVLLQYVDDLLLAAATRTECLEGTKALLETLGNKGYRASAKKAQICLQEVTYLGYSLKDGQRWLTKARKEAILSIPVPKNSRQVREFLGTAGYCRLWIPGFAELAAPLYPLTRPGTLFQWGTEQQLAFEDIKKALLSSPALGLPDITKPFELFIDENSGFAKGVLVQKLGPWKRPVAYLSKKLDTVASGWPPCLRMVAAIAILVKDAGKLTLGQPLTILTSHPVEALVRQPPNKWLSNARMTHYQAMLLDAERVHFGPTVSLNPATLLPLPSGGNHHDCLQILAETHGTRPDLTDQPLPDADLTWYTDGSSFIRNGEREAGAAVTTESEVIWAAPLPPGTSAQRAELIALTQALKMAEGKKLTVYTDSRYAFATTHVHGEIYRRRGLLTSEGKEIKNKNEILALLEALFLPKRLSIIHCPGHQKGDSPQAKGNRLADDTAKKAATETHSSLTVLP

SEQ ID NO: 8019 - protein, 670 aa, synthetic construct
TLQLEEEYRLFEPESTQKQEMDIWLKNFPQAWAETGGMGTAHCQAPVLIQLKATATPISIRQYPMPHEAYQGIKPHIRRMLDQGILKPCQSPWNTPLLPVKKPGTEDYRPVQDLREVNKRVEDIHPTVPNPYNLLSTLPPSHPWYTVLDLKDAFFCLRLHSESQLLFAFEWRDPEIGLSGQLTWTRLPQGFKNSPTLFNEALHSDLADFRVRYPALVLLQYVDDLLLAAATRTECLEGTKALLETLGNKGYRASAKKAQICLQEVTYLGYSLKDGQRWLTKARKEAILSIPVPKNSRQVREFLGTAGYCRLWIPGFAELAAPLYPLTRPGTLFQWGTEQQLAFEDIKKALLSSPALGLPDITKPFELFIDENSGFAKGVLVQKLGPWKRPVAYLSKKLDTVASGWPPCLRMVAAIAILVKDAGKLTLGQPLTILTSHPVEALVRQPPNKWLSNARMTHYQAMLLDAERVHFGPTVSLNPATLLPLPSGGNHHDCLQILAETHGTRPDLTDQPLPDADLTWYTDGSSFIRNGEREAGAAVTTESEVIWAAPLPPGTSAQRAELIALTQALKMAEGKKLTVYTDSRYAFATTHVHGEIYRRRGWLTSEGKEIKNKNEILALLEALFLPKRLSIIHCPGHQKGDSPQAKGNRLADDTAKKAATETHSSLTVLP

SEQ ID NO: 8020 - protein, 670 aa, synthetic construct
TLQLEEEYRLFEPESTQKQEMDIWLKNFPQAWAETGGMGTAHCQAPVLIQLKATATPISIRQYPMPHEAYQGIKPHIRRMLDQGILKPCQSPWNTPLLPVKKPGTEDYRPVQDLREVNKRVEDIHPTVPNPYNLLSTLPPSHPWYTVLDLKDAFFCLRLHSESQLLFAFEWRDPEIGLSGQLTWTRLPQGFKNSPTLFNEALHSDLADFRVRYPALVLLQYVDDLLLAAATRTECLEGTKALLETLGNKGYRASAKKAQICLQEVTYLGYSLKDGQRWLTKARKEAILSIPVPKNSRQVREFLGKAGYCRLFIPGFAELAAPLYPLTRPGTLFQWGTEQQLAFEDIKKALLSSPALGLPDITKPFELFIDENSGFAKGVLVQKLGPWKRPVAYLSKKLDTVASGWPPCLRMVAAIAILVKDAGKLTLGQPLTILTSHPVEALVRQPPNKWLSNARMTHYQAMLLDAERVHFGPTVSLNPATLLPLPSGGNHHDCLQILAETHGTRPDLTDQPLPDADLTWYTDGSSFIRNGEREAGAAVTTESEVIWAAPLPPGTSAQRAELIALTQALKMAEGKKLTVYTDSRYAFATTHVHGEIYRRRGWLTSEGKEIKNKNEILALLEALFLPKRLSIIHCPGHQKGDSPQAKGNRLADDTAKKAATETHSSLTVLP

SEQ ID NO: 8021 - protein, 751 aa, unidentified
MNPLQLLQPLPAEIKGTKLLAHWNSGATITCIPESFLEDEQPIKKTLIKTIHGEKQQNVYYVTFKVKGRKVEAEVIASPYEYILLSPTDVPWLTQQPLQLTILVPLQEYQEKILSKTALPEDQKQQLKTLFVKYDNLWQHWENQVGHRKIRPHNIATGDYPPRPQKQYPINPKAKPSIQIVIDDLLKQGVLTPQNSTMNTPVYPVPKPDGRWRMVLDYREVNKTIPLTAAQNQHSAGILATIVRQKYKTTLDLANGFWAHPITPESYWLTAFTWQGKQYCWTRLPQGFLNSPALFTADVVDLLKEIPNVQVYVDDIYLSHDDPKEHVQQLEKVFQILLQAGYVVSLKKSEIGQKTVEFLGFNITKEGRGLTDTFKTKLLNITPPKDLKQLQSILGLLNFARNFIPNFAELVQPLYNLIASAKGKYIEWSEENTKQLNMVIEALNTASNLEERLPEQRLVIKVNTSPSAGYVRYYNETGKKPIMYLNYVFSKAELKFSMLEKLLTTMHKALIKAMDLAMGQEILVYSPIVSMTKIQKTPLPERKALPIRWITWMTYLEDPRIQFHYDKTLPELKHIPDVYTSSQSPVKHPSQYEGVFYTDGSAIKSPDPTKSNNAGMGIVHATYKPEYQVLNQWSIPLGNHTAQMAEIAAVEFACKKALKIPGPVLVITDSFYVAESANKELPYWKSNGFVNNKKKPLKHISKWKSIAECLSMKPDITIQHEKGISLQIPVFILKGNALADKLATQGSYVVN

SEQ ID NO: 8022 - protein, 751 aa, synthetic construct
MNPLQLLQPLPAEIKGTKLLAHWNSGATITCIPESFLEDEQPIKKTLIKTIHGEKQQNVYYVTFKVKGRKVEAEVIASPYEYILLSPTDVPWLTQQPLQLTILVPLQEYQEKILSKTALPEDQKQQLKTLFVKYDNLWQHWENQVGHRKIRPHNIATGDYPPRPQKQYPINPKAKPSIQIVIDDLLKQGVLTPQNSTMNTPVYPVPKPDGRWRMVLDYREVNKTIPLTAAQNQHSAGILATIVRQKYKTTLDLANGFWAHPITPESYWLTAFTWQGKQYCWTRLPQGFLNSPALFNADVVDLLKEIPNVQVYVDDIYLSHDDPKEHVQQLEKVFQILLQAGYVVSLKKSEIGQKTVEFLGFNITKEGRGLTDTFKTKLLNITPPKDLKQLQSILGLLNFARNFIPNFAELVQPLYNLIAPAKGKYIEWSEENTKQLNMVIEALNTASNLEERLPEQRLVIKVNTSPSAGYVRYYNETGKKPIMYLNYVFSKAELKFSMLEKLLTTMHKALIKAMDLAMGQEILVYSPIVSMTKIQKTPLPERKALPIRWITWMTYLEDPRIQFHYDKTLPELKHIPDVYTSSQSPVKHPSQYEGVFYTDGSAIKSPDPTKSNNAGMGIVHATYKPEYQVLNQWSIPLGNHTAQMAEIAAVEFACKKALKIPGPVLVITDSFYVAESANKELPYWKSNGFVNNKKKPLKHISKWKSIAECLSMKPDITIQHEKGISLQIPVFILKGNALADKLATQGSYVVN

SEQ ID NO: 8023 - protein, 751 aa, synthetic construct
MNPLQLLQPLPAEIKGTKLLAHWNSGATITCIPESFLEDEQPIKKTLIKTIHGEKQQNVYYVTFKVKGRKVEAEVIASPYEYILLSPTDVPWLTQQPLQLTILVPLQEYQEKILSKTALPEDQKQQLKTLFVKYDNLWQHWENQVGHRKIRPHNIATGDYPPRPQKQYPINPKAKPSIQIVIDDLLKQGVLTPQNSTMNTPVYPVPKPDGRWRMVLDYREVNKTIPLTAAQNQHSAGILATIVRQKYKTTLDLANGFWAHPITPESYWLTAFTWQGKQYCWTRLPQGFLNSPALFNADVVDLLKEIPNVQVYVDDIYLSHDDPKEHVQQLEKVFQILLQAGYVVSLKKSEIGQKTVEFLGFNITKEGRGLTDTFKTKLLNITPPKDLKQLQSILGKLNFARNFIPNFAELVQPLYNLIAPAKGKYIEWSEENTKQLNMVIEALNTASNLEERLPEQRLVIKVNTSPSAGYVRYYNETGKKPIMYLNYVFSKAELKFSMLEKLLTTMHKALIKAMDLAMGQEILVYSPIVSMTKIQKTPLPERKALPIRWITWMTYLEDPRIQFHYDKTLPELKHIPDVYTSSQSPVKHPSQYEGVFYTDGSAIKSPDPTKSNNAGMGIVHATYKPEYQVLNQWSIPLGNHTAQMAEIAAVEFACKKALKIPGPVLVITDSFYVAESANKELPYWKSNGFVNNKKKPLKHISKWKSIAECLSMKPDITIQHEKGISLQIPVFILKGNALADKLATQGSYVVN

SEQ ID NO: 8024 - protein, 662 aa, unidentified
VPWLTQQPLQLTILVPLQEYQEKILSKTALPEDQKQQLKTLFVKYDNLWQHWENQVGHRKIRPHNIATGDYPPRPQKQYPINPKAKPSIQIVIDDLLKQGVLTPQNSTMNTPVYPVPKPDGRWRMVLDYREVNKTIPLTAAQNQHSAGILATIVRQKYKTTLDLANGFWAHPITPESYWLTAFTWQGKQYCWTRLPQGFLNSPALFTADVVDLLKEIPNVQVYVDDIYLSHDDPKEHVQQLEKVFQILLQAGYVVSLKKSEIGQKTVEFLGFNITKEGRGLTDTFKTKLLNITPPKDLKQLQSILGLLNFARNFIPNFAELVQPLYNLIASAKGKYIEWSEENTKQLNMVIEALNTASNLEERLPEQRLVIKVNTSPSAGYVRYYNETGKKPIMYLNYVFSKAELKFSMLEKLLTTMHKALIKAMDLAMGQEILVYSPIVSMTKIQKTPLPERKALPIRWITWMTYLEDPRIQFHYDKTLPELKHIPDVYTSSQSPVKHPSQYEGVFYTDGSAIKSPDPTKSNNAGMGIVHATYKPEYQVLNQWSIPLGNHTAQMAEIAAVEFACKKALKIPGPVLVITDSFYVAESANKELPYWKSNGFVNNKKKPLKHISKWKSIAECLSMKPDITIQHEKGISLQIPVFILKGNALADKLATQGSYVVN

SEQ ID NO: 8025 - protein, 662 aa, synthetic construct
VPWLTQQPLQLTILVPLQEYQEKILSKTALPEDQKQQLKTLFVKYDNLWQHWENQVGHRKIRPHNIATGDYPPRPQKQYPINPKAKPSIQIVIDDLLKQGVLTPQNSTMNTPVYPVPKPDGRWRMVLDYREVNKTIPLTAAQNQHSAGILATIVRQKYKTTLDLANGFWAHPITPESYWLTAFTWQGKQYCWTRLPQGFLNSPALFNADVVDLLKEIPNVQVYVDDIYLSHDDPKEHVQQLEKVFQILLQAGYVVSLKKSEIGQKTVEFLGFNITKEGRGLTDTFKTKLLNITPPKDLKQLQSILGLLNFARNFIPNFAELVQPLYNLIAPAKGKYIEWSEENTKQLNMVIEALNTASNLEERLPEQRLVIKVNTSPSAGYVRYYNETGKKPIMYLNYVFSKAELKFSMLEKLLTTMHKALIKAMDLAMGQEILVYSPIVSMTKIQKTPLPERKALPIRWITWMTYLEDPRIQFHYDKTLPELKHIPDVYTSSQSPVKHPSQYEGVFYTDGSAIKSPDPTKSNNAGMGIVHATYKPEYQVLNQWSIPLGNHTAQMAEIAAVEFACKKALKIPGPVLVITDSFYVAESANKELPYWKSNGFVNNKKKPLKHISKWKSIAECLSMKPDITIQHEKGISLQIPVFILKGNALADKLATQGSYVVN

SEQ ID NO: 8026 - protein, 662 aa, synthetic construct
VPWLTQQPLQLTILVPLQEYQEKILSKTALPEDQKQQLKTLFVKYDNLWQHWENQVGHRKIRPHNIATGDYPPRPQKQYPINPKAKPSIQIVIDDLLKQGVLTPQNSTMNTPVYPVPKPDGRWRMVLDYREVNKTIPLTAAQNQHSAGILATIVRQKYKTTLDLANGFWAHPITPESYWLTAFTWQGKQYCWTRLPQGFLNSPALFNADVVDLLKEIPNVQVYVDDIYLSHDDPKEHVQQLEKVFQILLQAGYVVSLKKSEIGQKTVEFLGFNITKEGRGLTDTFKTKLLNITPPKDLKQLQSILGKLNFARNFIPNFAELVQPLYNLIAPAKGKYIEWSEENTKQLNMVIEALNTASNLEERLPEQRLVIKVNTSPSAGYVRYYNETGKKPIMYLNYVFSKAELKFSMLEKLLTTMHKALIKAMDLAMGQEILVYSPIVSMTKIQKTPLPERKALPIRWITWMTYLEDPRIQFHYDKTLPELKHIPDVYTSSQSPVKHPSQYEGVFYTDGSAIKSPDPTKSNNAGMGIVHATYKPEYQVLNQWSIPLGNHTAQMAEIAAVEFACKKALKIPGPVLVITDSFYVAESANKELPYWKSNGFVNNKKKPLKHISKWKSIAECLSMKPDITIQHEKGISLQIPVFILKGNALADKLATQGSYVVN

SEQ ID NO: 8027 - protein, 669 aa, Gibbon ape leukemia virus
VLNLEEEYRLHEKPVPSSIDPSWLQLFPTVWAERAGMGLANQVPPVVVELRSGASPVAVRQYPMSKEAREGIRPHIQKFLDLGVLVPCRSPWNTPLLPVKKPGTNDYRPVQDLREINKRVQDIHPTVPNPYNLLSSLPPSYTWYSVLDLKDAFFCLRLHPNSQPLFAFEWKDPEKGNTGQLTWTRLPQGFKNSPTLFDEALHRDLAPFRALNPQVVLLQYVDDLLVAAPTYEDCKKGTQKLLQELSKLGYRVSAKKAQLCQREVTYLGYLLKEGKRWLTPARKATVMKIPVPTTPRQVREFLGTAGFCRLWIPGFASLAAPLYPLTKESIPFIWTEEHQQAFDHIKKALLSAPALALPDLTKPFTLYIDERAGVARGVLTQTLGPWRRPVAYLSKKLDPVASGWPTCLKAVAAVALLLKDADKLTLGQNVTVIASHSLESIVRQPPDRWMTNARMTHYQSLLLNERVSFAPPAVLNPATLLPVESEATPVHRCSEILAEETGTRRDLEDQPLPGVPTWYTDGSSFITEGKRRAGAPIVDGKRTVWASSLPEGTSAQKAELVALTQALRLAEGKNINIYTDSRYAFATAHIHGAIYKQRGLLTSAGKDIKNKEEILALLEAIHLPRRVAIIHCPGHQRGSNPVATGNRRADEAAKQAALSTRVLAGTTKP

SEQ ID NO: 8028 - protein, 669 aa, synthetic construct
VLNLEEEYRLHEKPVPSSIDPSWLQLFPTVWAERAGMGLANQVPPVVVELRSGASPVAVRQYPMSKEAREGIRPHIQKFLDLGVLVPCRSPWNTPLLPVKKPGTNDYRPVQDLREINKRVQDIHPTVPNPYNLLSSLPPSYTWYSVLDLKDAFFCLRLHPNSQPLFAFEWKDPEKGNTGQLTWTRLPQGFKNSPTLFNEALHRDLAPFRALNPQVVLLQYVDDLLVAAPTYEDCKKGTQKLLQELSKLGYRVSAKKAQLCQREVTYLGYLLKEGKRWLTPARKATVMKIPVPTTPRQVREFLGTAGFCRLWIPGFASLAAPLYPLTKPSIPFIWTEEHQQAFDHIKKALLSAPALALPDLTKPFTLYIDERAGVARGVLTQTLGPWRRPVAYLSKKLDPVASGWPTCLKAVAAVALLLKDADKLTLGQNVTVIASHSLESIVRQPPDRWMTNARMTHYQSLLLNERVSFAPPAVLNPATLLPVESEATPVHRCSEILAEETGTRRDLEDQPLPGVPTWYTDGSSFITEGKRRAGAPIVDGKRTVWASSLPEGTSAQKAELVALTQALRLAEGKNINIYTDSRYAFATAHIHGAIYKQRGWLTSAGKDIKNKEEILALLEAIHLPRRVAIIHCPGHQRGSNPVATGNRRADEAAKQAALSTRVLAGTTKP

SEQ ID NO: 8029 - protein, 669 aa, synthetic construct
VLNLEEEYRLHEKPVPSSIDPSWLQLFPTVWAERAGMGLANQVPPVVVELRSGASPVAVRQYPMSKEAREGIRPHIQKFLDLGVLVPCRSPWNTPLLPVKKPGTNDYRPVQDLREINKRVQDIHPTVPNPYNLLSSLPPSYTWYSVLDLKDAFFCLRLHPNSQPLFAFEWKDPEKGNTGQLTWTRLPQGFKNSPTLFNEALHRDLAPFRALNPQVVLLQYVDDLLVAAPTYEDCKKGTQKLLQELSKLGYRVSAKKAQLCQREVTYLGYLLKEGKRWLTPARKATVMKIPVPTTPRQVREFLGKAGFCRLFIPGFASLAAPLYPLTKPSIPFIWTEEHQQAFDHIKKALLSAPALALPDLTKPFTLYIDERAGVARGVLTQTLGPWRRPVAYLSKKLDPVASGWPTCLKAVAAVALLLKDADKLTLGQNVTVIASHSLESIVRQPPDRWMTNARMTHYQSLLLNERVSFAPPAVLNPATLLPVESEATPVHRCSEILAEETGTRRDLEDQPLPGVPTWYTDGSSFITEGKRRAGAPIVDGKRTVWASSLPEGTSAQKAELVALTQALRLAEGKNINIYTDSRYAFATAHIHGAIYKQRGWLTSAGKDIKNKEEILALLEAIHLPRRVAIIHCPGHQRGSNPVATGNRRADEAAKQAALSTRVLAGTTKP

SEQ ID NO: 8030 - protein, 588 aa, unidentified
AVLGLEHLPRPPQISQFPLNPERLQALQHLVRKALEAGHIEPYTGPGNNPVFPVKKANGTWRFIHDLRATNSLTIDLSSSSPGPPDLSSLPTTLAHLQTIDLRDAFFQIPLPKQFQPYFAFTVPQQCNYGPGTRYAWKVLPQGFKNSPTLFEMQLAHILQPIRQAFPQCTILQYMDDILLASPSHEDLLLLSEATMASLISHGLPVSENKTQQTPGTIKFLGQIISPNHLTYDAVPTVPIRSRWALPELQALLGEIQWVSKGTPTLRQPLHSLYCALQRHTDPRDQIYLNPSQVQSLVQLRQALSQNCRSRLVQTLPLLGAIMLTLTGTTTVVFQSKEQWPLVWLHAPLPHTSQCPWGQLLASAVLLLDKYTLQSYGLLCQTIHHNISTQTFNQFIQTSDHPSVPILLHHSHRFKNLGAQTGELWNTFLKTAAPLAPVKALMPVFTLSPVIINTAPCLFSDGSTSRAAYILWDKQILSQRSFPLPPPHKSAQRAELLGLLHGLSSARSWRCLNIFLDSKYLYHYLRTLALGTFQGRSSQAPFQALLPRLLSRKVVYLHHVRSHTNLPDPISRLNALTDALLITPVLQL

SEQ ID NO: 8031 - protein, 588 aa, synthetic construct
AVLGLEHLPRPPQISQFPLNPERLQALQHLVRKALEAGHIEPYTGPGNNPVFPVKKANGTWRFIHDLRATNSLTIDLSSSSPGPPDLSSLPTTLAHLQTIDLRDAFFQIPLPKQFQPYFAFTVPQQCNYGPGTRYAWKVLPQGFKNSPTLFQMQLAHILQPIRQAFPQCTILQYMDDILLASPSHEDLLLLSEATMASLISHGLPVSENKTQQTPGTIKFLGQIISPNHLTYDAVPTVPIRSRWALPELQALLGEIQWVSKGTPTLRQPLHSLYCALQPHTDPRDQIYLNPSQVQSLVQLRQALSQNCRSRLVQTLPLLGAIMLTLTGTTTVVFQSKEQWPLVWLHAPLPHTSQCPWGQLLASAVLLLDKYTLQSYGLLCQTIHHNISTQTFNQFIQTSDHPSVPILLHHSHRFKNLGAQTGELWNTFLKTAAPLAPVKALMPVFTLSPVIINTAPCLFSDGSTSRAAYILWDKQILSQRSFPLPPPHKSAQRAELLGLLHGLSSARSWRCLNIFLDSKYLYHYLRTLALGTFQGRSSQAPFQALLPRLLSRKVVYLHHVRSHTNLPDPISRLNALTDALLITPVLQL

SEQ ID NO: 8032 - protein, 588 aa, synthetic construct
AVLGLEHLPRPPQISQFPLNPERLQALQHLVRKALEAGHIEPYTGPGNNPVFPVKKANGTWRFIHDLRATNSLTIDLSSSSPGPPDLSSPPTTLAHLQTIDLRDAFFQIPLPKQFQPYFAFTVPQQCNYGPGTRYAWKVLPQGFKNSPTLFQMQLAHILQPIRQAFPQCTILQYMDDILLASPSHEDLLLLSEATMASLISHGLPVSENKTQQTPGTIKFLGQIISPNHLTYDAVPTVPIRSRWALPELQALLGEIQWVSKGTPTLRQPLHSLYCALQPHTDPRDQIYLNPSQVQSLVQLRQALSQNCRSRLVQTLPLLGAIMLTLTGTTTVVFQSKEQWPLVWLHAPLPHTSQCPWGQLLASAVLLLDKYTLQSYGLLCQTIHHNISTQTFNQFIQTSDHPSVPILLHHSHRFKNLGAQTGELWNTFLKTAAPLAPVKALMPVFTLSPVIINTAPCLFSDGSTSRAAYILWDKQILSQRSFPLPPPHKSAQRAELLGLLHGLSSARSWRCLNIFLDSKYLYHYLRTLALGTFQGRSSQAPFQALLPRLLSRKVVYLHHVRSHTNLPDPISRLNALTDALLITPVLQL

SEQ ID NO: 8033 - protein, 588 aa, unidentified
AVLGLEHLPRPPEISQFPLNPERLQALQHLVRKALEAGHIEPYTGPGNNPVFPVKKANGTWRFIHDLRATNSLTIDLSSSSPGPPDLSSLPTTLAHLQTIDLKDAFFQIPLPKQFQPYFAFTVPQQCNYGPGTRYAWRVLPQGFKNSPTLFEMQLAHILQPIRQAFPQCTILQYMDDILLASPSHADLQLLSEATMASLISHGLPVSENKTQQTPGTIKFLGQIISPNHLTYDAVPKVPIRSRWALPELQALLGEIQWVSKGTPTLRQPLHSLYCALQRHTDPRDQIYLNPSQVQSLVQLRQALSQNCRSRLVQTLPLLGAIMLTLTGTTTVVFQSKQQWPLVWLHAPLPHTSQCPWGQLLASAVLLLDKYTLQSYGLLCQTIHHNISTQTFNQFIQTSDHPSVPILLHHSHRFKNLGAQTGELWNTFLKTTAPLAPVKALMPVFTLSPVIINTAPCLFSDGSTSQAAYILWDKHILSQRSFPLPPPHKSAQRAELLGLLHGLSSARSWRCLNIFLDSKYLYHYLRTLALGTFQGRSSQAPFQALLPRLLSRKVVYLHHVRSHTNLPDPISRLNALTDALLITPVLQL

SEQ ID NO: 8034 - protein, 588 aa, synthetic construct
AVLGLEHLPRPPEISQFPLNPERLQALQHLVRKALEAGHIEPYTGPGNNPVFPVKKANGTWRFIHDLRATNSLTIDLSSSSPGPPDLSSLPTTLAHLQTIDLKDAFFQIPLPKQFQPYFAFTVPQQCNYGPGTRYAWRVLPQGFKNSPTLFQMQLAHILQPIRQAFPQCTILQYMDDILLASPSHADLQLLSEATMASLISHGLPVSENKTQQTPGTIKFLGQIISPNHLTYDAVPKVPIRSRWALPELQALLGEIQWVSKGTPTLRQPLHSLYCALQPHTDPRDQIYLNPSQVQSLVQLRQALSQNCRSRLVQTLPLLGAIMLTLTGTTTVVFQSKQQWPLVWLHAPLPHTSQCPWGQLLASAVLLLDKYTLQSYGLLCQTIHHNISTQTFNQFIQTSDHPSVPILLHHSHRFKNLGAQTGELWNTFLKTTAPLAPVKALMPVFTLSPVIINTAPCLFSDGSTSQAAYILWDKHILSQRSFPLPPPHKSAQRAELLGLLHGLSSARSWRCLNIFLDSKYLYHYLRTLALGTFQGRSSQAPFQALLPRLLSRKVVYLHHVRSHTNLPDPISRLNALTDALLITPVLQL

SEQ ID NO: 8035 - protein, 583 aa, unidentified
GLEHLPRPPEISQFPLNPERLQALQHLVRKALEAGHIEPYTGPGNNPVFPVKKANGTWRFIHDLRATNSLTVDLSSSSPGPPDLSSLPTTLAHLQTIDLKDAFFQIPLPKQFQPYFAFTVPQQCNYGPGTRYAWKVLPQGFKNSPTLFEMQLASILQPIRQAFPQCVILQYMDDILLASPSPEDLQQLSEATMASLISHGLPVSQDKTQQTPGTIKFLGQIISPNHITYDAVPTVPIRSRWALPELQALLGEIQWVSKGTPTLRQPLHSLYCALQGHTDPRDQIYLNPSQVQSLMQLQQALSQNCRSRLAQTLPLLGAIMLTLTGTTTVVFQSKQQWPLVWLHAPLPHTSQCPWGQLLASAVLLLDKYTLQSYGLLCQTIHHNISIQTFNQFIQTSDHPSVPILLHHSHRFKNLGAQTGELWNTFLKTAAPLAPVKALTPVFTLSPIIINTAPCLFSDGSTSQAAYILWDKHILSQRSFPLPPPHKSAQQAELLGLLHGLSSARSWHCLNIFLDSKYLYHYLRTLALGTFQGKSSQAPFQALLPRLLAHKVIYLHHVRSHTNLPDPISKLNALTDALLITPIL

SEQ ID NO: 8036 - protein, 583 aa, synthetic construct
GLEHLPRPPEISQFPLNPERLQALQHLVRKALEAGHIEPYTGPGNNPVFPVKKANGTWRFIHDLRATNSLTVDLSSSSPGPPDLSSLPTTLAHLQTIDLKDAFFQIPLPKQFQPYFAFTVPQQCNYGPGTRYAWKVLPQGFKNSPTLFQMQLASILQPIRQAFPQCVILQYMDDILLASPSPEDLQQLSEATMASLISHGLPVSQDKTQQTPGTIKFLGQIISPNHITYDAVPTVPIRSRWALPELQALLGEIQWVSKGTPTLRQPLHSLYCALQGHTDPRDQIYLNPSQVQSLMQLQQALSQNCRSRLAQTLPLLGAIMLTLTGTTTVVFQSKQQWPLVWLHAPLPHTSQCPWGQLLASAVLLLDKYTLQSYGLLCQTIHHNISIQTFNQFIQTSDHPSVPILLHHSHRFKNLGAQTGELWNTFLKTAAPLAPVKALTPVFTLSPIIINTAPCLFSDGSTSQAAYILWDKHILSQRSFPLPPPHKSAQQAELLGLLHGLSSARSWHCLNIFLDSKYLYHYLRTLAWGTFQGKSSQAPFQALLPRLLAHKVIYLHHVRSHTNLPDPISKLNALTDALLITPIL

SEQ ID NO: 8037 - protein, 583 aa, synthetic construct
GLEHLPRPPEISQFPLNPERLQALQHLVRKALEAGHIEPYTGPGNNPVFPVKKANGTWRFIHDLRATNSLTVDLSSSSPGPPDLSSPPTTLAHLQTIDLKDAFFQIPLPKQFQPYFAFTVPQQCNYGPGTRYAWKVLPQGFKNSPTLFQMQLASILQPIRQAFPQCVILQYMDDILLASPSPEDLQQLSEATMASLISHGLPVSQDKTQQTPGTIKFLGQIISPNHITYDAVPTVPIRSRWALPELQALLGEIQWVSKGTPTLRQPLHSLYCALQGHTDPRDQIYLNPSQVQSLMQLQQALSQNCRSRLAQTLPLLGAIMLTLTGTTTVVFQSKQQWPLVWLHAPLPHTSQCPWGQLLASAVLLLDKYTLQSYGLLCQTIHHNISIQTFNQFIQTSDHPSVPILLHHSHRFKNLGAQTGELWNTFLKTAAPLAPVKALTPVFTLSPIIINTAPCLFSDGSTSQAAYILWDKHILSQRSFPLPPPHKSAQQAELLGLLHGLSSARSWHCLNIFLDSKYLYHYLRTLAWGTFQGKSSQAPFQALLPRLLAHKVIYLHHVRSHTNLPDPISKLNALTDALLITPIL

SEQ ID NO: 8038 - protein, 584 aa, unidentified
GLEHLPPPPEVSQFPLNPERLQALTDLVSRALEAKHIEPYQGPGNNPIFPVKKPNGKWRFIHDLRATNSVTRDLASPSPGPPDLTSLPQGLPHLRTIDLTDAFFQIPLPTIFQPYFAFTLPQPNNYGPGTRYSWRVLPQGFKNSPTLFEQQLSHILTPVRKTFPNSLIIQYMDDILLASPAPGELAALTDKVTNALTKEGLPLSPEKTQATPGPIHFLGQVISQDCITYETLPSINVKSTWSLAELQSMLGELQWVSKGTPVLRSSLHQLYLALRGHRDPRDTIKLTSIQVQALRTIQKALTLNCRSRLVNQLPILALIMLRPTGTTAVLFQTKQKWPLVWLHTPHPATSLRPWGQLLANAVIILDKYSLQHYGQVCKSFHHNISNQALTYYLHTSDQSSVAILLQHSHRFHNLGAQPSGPWRSLLQMPQIFQNIDVLRPPFTISPVVINHAPCLFSDGSASKAAFIIWDRQVIHQQVLSLPSTCSAQAGELFGLLAGLQKSQPWVALNIFLDSKFLIGHLRRMALGAFPGPSTQCELHTQLLPLLQGKTVYVHHVRSHTLLQDPISRLNEATDALMLAPLLPL

SEQ ID NO: 8039 - protein, 584 aa, synthetic construct
GLEHLPPPPEVSQFPLNPERLQALTDLVSRALEAKHIEPYQGPGNNPIFPVKKPNGKWRFIHDLRATNSVTRDLASPSPGPPDLTSLPQGLPHLRTIDLTDAFFQIPLPTIFQPYFAFTLPQPNNYGPGTRYSWRVLPQGFKNSPTLFQQQLSHILTPVRKTFPNSLIIQYMDDILLASPAPGELAALTDKVTNALTKEGLPLSPEKTQATPGPIHFLGQVISQDCITYETLPSINVKSTWSLAELQSMLGELQWVSKGTPVLRSSLHQLYLALRGHRDPRDTIKLTSIQVQALRTIQKALTLNCRSRLVNQLPILALIMLRPTGTTAVLFQTKQKWPLVWLHTPHPATSLRPWGQLLANAVIILDKYSLQHYGQVCKSFHHNISNQALTYYLHTSDQSSVAILLQHSHRFHNLGAQPSGPWRSLLQMPQIFQNIDVLRPPFTISPVVINHAPCLFSDGSASKAAFIIWDRQVIHQQVLSLPSTCSAQAGELFGLLAGLQKSQPWVALNIFLDSKFLIGHLRRMAWGAFPGPSTQCELHTQLLPLLQGKTVYVHHVRSHTLLQDPISRLNEATDALMLAPLLPL

SEQ ID NO: 8040 - protein, 584 aa, synthetic construct
GLEHLPPPPEVSQFPLNPERLQALTDLVSRALEAKHIEPYQGPGNNPIFPVKKPNGKWRFIHDLRATNSVTRDLASPSPGPPDLTSPPQGLPHLRTIDLTDAFFQIPLPTIFQPYFAFTLPQPNNYGPGTRYSWRVLPQGFKNSPTLFQQQLSHILTPVRKTFPNSLIIQYMDDILLASPAPGELAALTDKVTNALTKEGLPLSPEKTQATPGPIHFLGQVISQDCITYETLPSINVKSTWSLAELQSMLGELQWVSKGTPVLRSSLHQLYLALRGHRDPRDTIKLTSIQVQALRTIQKALTLNCRSRLVNQLPILALIMLRPTGTTAVLFQTKQKWPLVWLHTPHPATSLRPWGQLLANAVIILDKYSLQHYGQVCKSFHHNISNQALTYYLHTSDQSSVAILLQHSHRFHNLGAQPSGPWRSLLQMPQIFQNIDVLRPPFTISPVVINHAPCLFSDGSASKAAFIIWDRQVIHQQVLSLPSTCSAQAGELFGLLAGLQKSQPWVALNIFLDSKFLIGHLRRMAWGAFPGPSTQCELHTQLLPLLQGKTVYVHHVRSHTLLQDPISRLNEATDALMLAPLLPL

SEQ ID NO: 8041 - protein, 584 aa, unidentified
GLEHLPPPPEVSQFPLNPERLQALTDLVSRALEAKHIEPYQGPGNNPIFPVKKPNGKWRFIHDLRATNSLTRDLASPSPGPPDLTSLPQDLPHLRTIDLTDAFFQIPLPAVFQPYFAFTLPQPNNHGPGTRYSWRVLPQGFKNSPTLFEQQLSHILAPVRKAFPNSLIIQYMDDILLASPALRELTALTDKVTNALTKEGLPMSLEKTQATPGSIHFLGQVISPDCITYETLPSIHVKSIWSLAELQSMLGELQWVSKGTPVLRSSLHQLYLALRGHRDPRDTIELTSTQVQALKTIQKALALNCRSRLVSQLPILALIILRPTGTTAVLFQTKQKWPLVWLHTPHPATSLRPWGQLLANAIITLDKYSLQHYGQICKSFHHNISNQALTYYLHTSDQSSVAILLQHSHRFHNLGAQPSGPWRSLLQVPQIFQNIDVLRPPFIISPVVIDHAPCLFSDGATSKAAFILWDKQVIHQQVLPLPSTCSAQAGELFGLLAGLQKSKPWPALNIFLDSKFLIGHLRRMALGAFLGPSTQCDLHARLFPLLQGKTVYVHHVRSHTLLQDPISRLNEATDALMLAPLLPL

SEQ ID NO: 8042 - protein, 584 aa, synthetic construct
GLEHLPPPPEVSQFPLNPERLQALTDLVSRALEAKHIEPYQGPGNNPIFPVKKPNGKWRFIHDLRATNSLTRDLASPSPGPPDLTSLPQDLPHLRTIDLTDAFFQIPLPAVFQPYFAFTLPQPNNHGPGTRYSWRVLPQGFKNSPTLFQQQLSHILAPVRKAFPNSLIIQYMDDILLASPALRELTALTDKVTNALTKEGLPMSLEKTQATPGSIHFLGQVISPDCITYETLPSIHVKSIWSLAELQSMLGELQWVSKGTPVLRSSLHQLYLALRGHRDPRDTIELTSTQVQALKTIQKALALNCRSRLVSQLPILALIILRPTGTTAVLFQTKQKWPLVWLHTPHPATSLRPWGQLLANAIITLDKYSLQHYGQICKSFHHNISNQALTYYLHTSDQSSVAILLQHSHRFHNLGAQPSGPWRSLLQVPQIFQNIDVLRPPFIISPVVIDHAPCLFSDGATSKAAFILWDKQVIHQQVLPLPSTCSAQAGELFGLLAGLQKSKPWPALNIFLDSKFLIGHLRRMAWGAFLGPSTQCDLHARLFPLLQGKTVYVHHVRSHTLLQDPISRLNEATDALMLAPLLPL

SEQ ID NO: 8043 - protein, 584 aa, synthetic construct
GLEHLPPPPEVSQFPLNPERLQALTDLVSRALEAKHIEPYQGPGNNPIFPVKKPNGKWRFIHDLRATNSLTRDLASPSPGPPDLTSPPQDLPHLRTIDLTDAFFQIPLPAVFQPYFAFTLPQPNNHGPGTRYSWRVLPQGFKNSPTLFQQQLSHILAPVRKAFPNSLIIQYMDDILLASPALRELTALTDKVTNALTKEGLPMSLEKTQATPGSIHFLGQVISPDCITYETLPSIHVKSIWSLAELQSMLGELQWVSKGTPVLRSSLHQLYLALRGHRDPRDTIELTSTQVQALKTIQKALALNCRSRLVSQLPILALIILRPTGTTAVLFQTKQKWPLVWLHTPHPATSLRPWGQLLANAIITLDKYSLQHYGQICKSFHHNISNQALTYYLHTSDQSSVAILLQHSHRFHNLGAQPSGPWRSLLQVPQIFQNIDVLRPPFIISPVVIDHAPCLFSDGATSKAAFILWDKQVIHQQVLPLPSTCSAQAGELFGLLAGLQKSKPWPALNIFLDSKFLIGHLRRMAWGAFLGPSTQCDLHARLFPLLQGKTVYVHHVRSHTLLQDPISRLNEATDALMLAPLLPL

SEQ ID NO: 8044 - protein, 584 aa, synthetic construct
HLPPPPQVDQFPLNLPERLQALNDLVSKALEAGHIEPYSGPGNNPVFPVKKPNGKWRFIHDLRATNAITTTLTSPSPGPPDLTSLPTALPHLQTIDLTDAFFQIPLPKQYQPYFAFTIPQPCNYGPGTRYAWTVLPQGFKNSPTLFQQQLAAVLNPMRKMFPTSTIVQYMDDILLASPTNEELQQLSQLTLQALTTHGLPISQEKTQQTPGQIRFLGQVISPNHITYESTPTIPIKSQWTLTELQVILGEIQWVSKGTPILRKHLQSLYSALHPYRDPRACITLTPQQLHALHAIQQALQHNCRGRLNPALPLLGLISLSTSGTTSVIFQPKQNWPLAWLHTPHPPTSLCPWGHLLACTILTLDKYTLQHYGQLCQSFHHNMSKQALCDFLRNSPHPSVGILIHHMGRFHNLGSQPSGPWKTLLHLPTLLQEPRLLRPIFTLSPVVLDTAPCLFSDGSPQKAAYVLWDQTILQQDITPLPSHETHSAQKGELLALICGLRAAKPWPSLNIFLDSKYLIKYLHSLAIGAFLGTSAHQTLQAALPPLLQGKTIYLHHVRSHTNLPDPISTFNEYTDSLILAPLVPL

SEQ ID NO: 8045 - protein, 581 aa, Jaagsiekte sheep retrovirus
PLGTSDSPVTHADPIDWKSEEPVWVDQWPLTQEKLSAAQQLVQEQLRLGHIEPSTSAWNSPIFVIKKKSGKWRLLQDLRKVNETMMHMGALQPGLPTPSAIPDKSYIIVIDLKDCFYTIPLAPQDCKRFAFSLPSVNFKEPMQRYQWRVLPQGMTNSPTLCQKFVATAIAPVRQRFPQLYLVHYMDDILLAHTDEHLLYQAFSILKQHLSLNGLVIADEKIQTHFPYNYLGFSLYPRVYNTQLVKLQTDHLKTLNDFQKLLGDINWIRPYLKLPTYTLQPLFDILKGDSDPASPRTLSLEGRTALQSIEEAIRQQQITYCDYQRSWGLYILPTPRAPTGVLYQDKPLRWIYLSATPTKHLLPYYELVAKIIAKGRHEAIQYFGMEPPFICVPYALEQQDWLFQFSDNWSIAFANYPGQITHHYPSDKLLQFASSHAFIFPKIVRRQPIPEATLIFTDGSSNGTAALIINHQTYYAQTSFSSAQVVELFAVHQALLTVPTSFNLFTDSSYVVGALQMIETVPIIGTTSPEVLNLFTLIQQVLHCRQHPCFFGHIRAHSTLPGALVQGNHTADVLTKQVFFQS

SEQ ID NO: 8046 - protein, 581 aa, synthetic construct
PLGTSDSPVTHADPIDWKSEEPVWVDQWPLTQEKLSAAQQLVQEQLRLGHIEPSTSAWNSPIFVIKKKSGKWRLLQDLRKVNETMMHMGALQPGLPTPSPIPDKSYIIVIDLKDCFYTIPLAPQDCKRFAFSLPSVNFKEPMQRYQWRVLPQGMTNSPTLCQKFVATAIAPVRQRFPQLYLVHYMDDILLAHTDEHLLYQAFSILKQHLSLNGLVIADEKIQTHFPYNYLGFSLYPRVYNTQLVKLQTDHLKTLNDFQKLLGDINWIRPYLKLPTYTLQPLFDILKGDSDPASPRTLSLEGRTALQSIEEAIRQQQITYCDYQRSWGLYILPTPRAPTGVLYQDKPLRWIYLSATPTKHLLPYYELVAKIIAKGRHEAIQYFGMEPPFICVPYALEQQDWLFQFSDNWSIAFANYPGQITHHYPSDKLLQFASSHAFIFPKIVRRQPIPEATLIFTDGSSNGTAALIINHQTYYAQTSFSSAQVVELFAVHQALLTVPTSFNLFTDSSYVVGALQMIETVPIIGTTSPEVLNLFTLIQQVLHCRQHPCFFGHIRAHSTLPGALVQGNHTADVLTKQVFFQS

SEQ ID NO: 8047 - protein, 793 aa, Koala retrovirus
TLGDQGSRGSDPLPEPRVTLTVEGIPTEFLVNTGAEHSVLTKPMGKMGSKRTVVAGATGSKVYPWTTKRLLKIGQKQVTHSFLVIPECPAPLLGRDLLTKLKAQIQFSTEGPQVTWEDRPAMCLVLNLEEEYRLHEKPVPPSIDPSWLQLFPMVWAEKAGMGLANQVPPVVVELKSDASPVAVRQYPMSKEAREGIRPHIQRFLDLGILVPCQSPWNTPLLPVKKPGTNDYRPVQDLREVNKRVQDIHPTVPNPYNLLSSLPPSHTWYSVLDLKDAFFCLKLHPNSQPLFAFEWRDPEKGNTGQLTWTRLPQGFKNSPTLFDEALHRDLASFRALNPQVVMLQYVDDLLVAAPTYRDCKEGTRRLLQELSKLGYRVSAKKAQLCREEVTYLGYLLKGGKRWLTPARKATVMKIPTPTTPRQVREFLGTAGFCRLWIPGFASLAAPLYPLTREKVPFTWTEAHQEAFGRIKEALLSAPALALPDLTKPFALYVDEKEGVARGVLTQTLGPWRRPVAYLSKKLDPVASGWPTCLKAIAAVALLLKDADKLTLGQNVLVIAPHNLESIVRQPPDRWMTNARMTHYQSLLLNERVSFAPPAILNPATLLPVESDDTPIHICSEILAEETGTRPDLRDQPLPGVPAWYTDGSSFIMDGRRQAGAAIVDNKRTVWASNLPEGTSAQKAELIALTQALRLAEGKSINIYTDSRYAFATAHVHGAIYKQRGLLTSAGKDIKNKEEILALLEAIHLPKRVAIIHCPGHQRGTDPVATGNRKADEAAKQAAQSTRILTETTKN

SEQ ID NO: 8048 - protein, 793 aa, synthetic construct
TLGDQGSRGSDPLPEPRVTLTVEGIPTEFLVNTGAEHSVLTKPMGKMGSKRTVVAGATGSKVYPWTTKRLLKIGQKQVTHSFLVIPECPAPLLGRDLLTKLKAQIQFSTEGPQVTWEDRPAMCLVLNLEEEYRLHEKPVPPSIDPSWLQLFPMVWAEKAGMGLANQVPPVVVELKSDASPVAVRQYPMSKEAREGIRPHIQRFLDLGILVPCQSPWNTPLLPVKKPGTNDYRPVQDLREVNKRVQDIHPTVPNPYNLLSSLPPSHTWYSVLDLKDAFFCLKLHPNSQPLFAFEWRDPEKGNTGQLTWTRLPQGFKNSPTLFNEALHRDLASFRALNPQVVMLQYVDDLLVAAPTYRDCKEGTRRLLQELSKLGYRVSAKKAQLCREEVTYLGYLLKGGKRWLTPARKATVMKIPTPTTPRQVREFLGTAGFCRLWIPGFASLAAPLYPLTRPKVPFTWTEAHQEAFGRIKEALLSAPALALPDLTKPFALYVDEKEGVARGVLTQTLGPWRRPVAYLSKKLDPVASGWPTCLKAIAAVALLLKDADKLTLGQNVLVIAPHNLESIVRQPPDRWMTNARMTHYQSLLLNERVSFAPPAILNPATLLPVESDDTPIHICSEILAEETGTRPDLRDQPLPGVPAWYTDGSSFIMDGRRQAGAAIVDNKRTVWASNLPEGTSAQKAELIALTQALRLAEGKSINIYTDSRYAFATAHVHGAIYKQRGWLTSAGKDIKNKEEILALLEAIHLPKRVAIIHCPGHQRGTDPVATGNRKADEAAKQAAQSTRILTETTKN

SEQ ID NO: 8049 - protein, 793 aa, synthetic construct
TLGDQGSRGSDPLPEPRVTLTVEGIPTEFLVNTGAEHSVLTKPMGKMGSKRTVVAGATGSKVYPWTTKRLLKIGQKQVTHSFLVIPECPAPLLGRDLLTKLKAQIQFSTEGPQVTWEDRPAMCLVLNLEEEYRLHEKPVPPSIDPSWLQLFPMVWAEKAGMGLANQVPPVVVELKSDASPVAVRQYPMSKEAREGIRPHIQRFLDLGILVPCQSPWNTPLLPVKKPGTNDYRPVQDLREVNKRVQDIHPTVPNPYNLLSSLPPSHTWYSVLDLKDAFFCLKLHPNSQPLFAFEWRDPEKGNTGQLTWTRLPQGFKNSPTLFNEALHRDLASFRALNPQVVMLQYVDDLLVAAPTYRDCKEGTRRLLQELSKLGYRVSAKKAQLCREEVTYLGYLLKGGKRWLTPARKATVMKIPTPTTPRQVREFLGKAGFCRLFIPGFASLAAPLYPLTRPKVPFTWTEAHQEAFGRIKEALLSAPALALPDLTKPFALYVDEKEGVARGVLTQTLGPWRRPVAYLSKKLDPVASGWPTCLKAIAAVALLLKDADKLTLGQNVLVIAPHNLESIVRQPPDRWMTNARMTHYQSLLLNERVSFAPPAILNPATLLPVESDDTPIHICSEILAEETGTRPDLRDQPLPGVPAWYTDGSSFIMDGRRQAGAAIVDNKRTVWASNLPEGTSAQKAELIALTQALRLAEGKSINIYTDSRYAFATAHVHGAIYKQRGWLTSAGKDIKNKEEILALLEAIHLPKRVAIIHCPGHQRGTDPVATGNRKADEAAKQAAQSTRILTETTKN

SEQ ID NO: 8050 - protein, 702 aa, Koala retrovirus
LLGRDLLTKLKAQIQFSTEGPQVTWEDRPAMCLVLNLEEEYRLHEKPVPPSIDPSWLQLFPMVWAEKAGMGLANQVPPVVVELKSDASPVAVRQYPMSKEAREGIRPHIQRFLDLGILVPCQSPWNTPLLPVKKPGTNDYRPVQDLREVNKRVQDIHPTVPNPYNLLSSLPPSHTWYSVLDLKDAFFCLKLHPNSQPLFAFEWRDPEKGNTGQLTWTRLPQGFKNSPTLFDEALHRDLASFRALNPQVVMLQYVDDLLVAAPTYRDCKEGTRRLLQELSKLGYRVSAKKAQLCREEVTYLGYLLKGGKRWLTPARKATVMKIPTPTTPRQVREFLGTAGFCRLWIPGFASLAAPLYPLTREKVPFTWTEAHQEAFGRIKEALLSAPALALPDLTKPFALYVDEKEGVARGVLTQTLGPWRRPVAYLSKKLDPVASGWPTCLKAIAAVALLLKDADKLTLGQNVLVIAPHNLESIVRQPPDRWMTNARMTHYQSLLLNERVSFAPPAILNPATLLPVESDDTPIHICSEILAEETGTRPDLRDQPLPGVPAWYTDGSSFIMDGRRQAGAAIVDNKRTVWASNLPEGTSAQKAELIALTQALRLAEGKSINIYTDSRYAFATAHVHGAIYKQRGLLTSAGKDIKNKEEILALLEAIHLPKRVAIIHCPGHQRGTDPVATGNRKADEAAKQAAQSTRILTETTKN

SEQ ID NO: 8051 - protein, 702 aa, synthetic construct
LLGRDLLTKLKAQIQFSTEGPQVTWEDRPAMCLVLNLEEEYRLHEKPVPPSIDPSWLQLFPMVWAEKAGMGLANQVPPVVVELKSDASPVAVRQYPMSKEAREGIRPHIQRFLDLGILVPCQSPWNTPLLPVKKPGTNDYRPVQDLREVNKRVQDIHPTVPNPYNLLSSLPPSHTWYSVLDLKDAFFCLKLHPNSQPLFAFEWRDPEKGNTGQLTWTRLPQGFKNSPTLFNEALHRDLASFRALNPQVVMLQYVDDLLVAAPTYRDCKEGTRRLLQELSKLGYRVSAKKAQLCREEVTYLGYLLKGGKRWLTPARKATVMKIPTPTTPRQVREFLGTAGFCRLWIPGFASLAAPLYPLTRPKVPFTWTEAHQEAFGRIKEALLSAPALALPDLTKPFALYVDEKEGVARGVLTQTLGPWRRPVAYLSKKLDPVASGWPTCLKAIAAVALLLKDADKLTLGQNVLVIAPHNLESIVRQPPDRWMTNARMTHYQSLLLNERVSFAPPAILNPATLLPVESDDTPIHICSEILAEETGTRPDLRDQPLPGVPAWYTDGSSFIMDGRRQAGAAIVDNKRTVWASNLPEGTSAQKAELIALTQALRLAEGKSINIYTDSRYAFATAHVHGAIYKQRGWLTSAGKDIKNKEEILALLEAIHLPKRVAIIHCPGHQRGTDPVATGNRKADEAAKQAAQSTRILTETTKN

SEQ ID NO: 8052 - protein, 702 aa, synthetic construct
LLGRDLLTKLKAQIQFSTEGPQVTWEDRPAMCLVLNLEEEYRLHEKPVPPSIDPSWLQLFPMVWAEKAGMGLANQVPPVVVELKSDASPVAVRQYPMSKEAREGIRPHIQRFLDLGILVPCQSPWNTPLLPVKKPGTNDYRPVQDLREVNKRVQDIHPTVPNPYNLLSSLPPSHTWYSVLDLKDAFFCLKLHPNSQPLFAFEWRDPEKGNTGQLTWTRLPQGFKNSPTLFNEALHRDLASFRALNPQVVMLQYVDDLLVAAPTYRDCKEGTRRLLQELSKLGYRVSAKKAQLCREEVTYLGYLLKGGKRWLTPARKATVMKIPTPTTPRQVREFLGKAGFCRLFIPGFASLAAPLYPLTRPKVPFTWTEAHQEAFGRIKEALLSAPALALPDLTKPFALYVDEKEGVARGVLTQTLGPWRRPVAYLSKKLDPVASGWPTCLKAIAAVALLLKDADKLTLGQNVLVIAPHNLESIVRQPPDRWMTNARMTHYQSLLLNERVSFAPPAILNPATLLPVESDDTPIHICSEILAEETGTRPDLRDQPLPGVPAWYTDGSSFIMDGRRQAGAAIVDNKRTVWASNLPEGTSAQKAELIALTQALRLAEGKSINIYTDSRYAFATAHVHGAIYKQRGWLTSAGKDIKNKEEILALLEAIHLPKRVAIIHCPGHQRGTDPVATGNRKADEAAKQAAQSTRILTETTKN

SEQ ID NO: 8053 - protein, 671 aa, unidentified
TLNLEDEYRLYETSAEPEVSPGSTWLSDFPQAWAETGGMGLAVRQAPLIIPLKATSTPVSIKQYPMSQEAKLGIKPHIQRLLDQGILVPCQSPWNTPLLPVKKPGTNDYRPVQDLREVNKRVEDIHPTVPNPYNLLSGLPPSHRWYTVLDLKDAFFCLRLHPTSQPLFAFEWRDPGMGISGQLTWTRLPQGFKNSPTLFDEALHRDLADFRIQHPDLILLQYVDDILLAATSELDCQQGTRALLLTLGNLGYRASAKKAQLCQKQVKYLGYLLKEGQRWLTEARKETVMGQPTPKTPRQLREFLGTAGFCRLWIPGFAEMAAPLYPLTKTGTLFNWGPDQQKAYQEIKQALLTAPALGLPDLTKPFELFVDEKQGYAKGVLTQKLGPWRRPVAYLSKKLDPVAAGWPPCLRMVAAIAVLRKDAGKLTMGQPLVILAPHAVEALVKQPPDRWLSNARMTHYQAMLLDTDRVQFGPVVALNPATLLPLPEEGAPHDCLEILAETHGTRPDLTDQPIPDADHTWYTDGSSFLQEGQRKAGAAVTTETEVIWARALPAGTSAQRAELIALTQALKMAEGKRLNVYTDSRYAFATAHIHGEIYRRRGLLTSEGREIKNKSEILALLKALFLPKRLSIIHCLGHQKGDSAEARGNRLADQAAREAAIKTPPDTSTLL

SEQ ID NO: 8054 - protein, 671 aa, synthetic construct
TLNLEDEYRLYETSAEPEVSPGSTWLSDFPQAWAETGGMGLAVRQAPLIIPLKATSTPVSIKQYPMSQEAKLGIKPHIQRLLDQGILVPCQSPWNTPLLPVKKPGTNDYRPVQDLREVNKRVEDIHPTVPNPYNLLSGLPPSHRWYTVLDLKDAFFCLRLHPTSQPLFAFEWRDPGMGISGQLTWTRLPQGFKNSPTLFNEALHRDLADFRIQHPDLILLQYVDDILLAATSELDCQQGTRALLLTLGNLGYRASAKKAQLCQKQVKYLGYLLKEGQRWLTEARKETVMGQPTPKTPRQLREFLGTAGFCRLWIPGFAEMAAPLYPLTKPGTLFNWGPDQQKAYQEIKQALLTAPALGLPDLTKPFELFVDEKQGYAKGVLTQKLGPWRRPVAYLSKKLDPVAAGWPPCLRMVAAIAVLRKDAGKLTMGQPLVILAPHAVEALVKQPPDRWLSNARMTHYQAMLLDTDRVQFGPVVALNPATLLPLPEEGAPHDCLEILAETHGTRPDLTDQPIPDADHTWYTDGSSFLQEGQRKAGAAVTTETEVIWARALPAGTSAQRAELIALTQALKMAEGKRLNVYTDSRYAFATAHIHGEIYRRRGWLTSEGREIKNKSEILALLKALFLPKRLSIIHCLGHQKGDSAEARGNRLADQAAREAAIKTPPDTSTLL

SEQ ID NO: 8055 - protein, 671 aa, synthetic construct
TLNLEDEYRLYETSAEPEVSPGSTWLSDFPQAWAETGGMGLAVRQAPLIIPLKATSTPVSIKQYPMSQEAKLGIKPHIQRLLDQGILVPCQSPWNTPLLPVKKPGTNDYRPVQDLREVNKRVEDIHPTVPNPYNLLSGLPPSHRWYTVLDLKDAFFCLRLHPTSQPLFAFEWRDPGMGISGQLTWTRLPQGFKNSPTLFNEALHRDLADFRIQHPDLILLQYVDDILLAATSELDCQQGTRALLLTLGNLGYRASAKKAQLCQKQVKYLGYLLKEGQRWLTEARKETVMGQPTPKTPRQLREFLGKAGFCRLFIPGFAEMAAPLYPLTKPGTLFNWGPDQQKAYQEIKQALLTAPALGLPDLTKPFELFVDEKQGYAKGVLTQKLGPWRRPVAYLSKKLDPVAAGWPPCLRMVAAIAVLRKDAGKLTMGQPLVILAPHAVEALVKQPPDRWLSNARMTHYQAMLLDTDRVQFGPVVALNPATLLPLPEEGAPHDCLEILAETHGTRPDLTDQPIPDADHTWYTDGSSFLQEGQRKAGAAVTTETEVIWARALPAGTSAQRAELIALTQALKMAEGKRLNVYTDSRYAFATAHIHGEIYRRRGWLTSEGREIKNKSEILALLKALFLPKRLSIIHCLGHQKGDSAEARGNRLADQAAREAAIKTPPDTSTLL

SEQ ID NO: 8056 - protein, 671 aa, Murine leukemia virus
TLGIEDEYRLHETSTEPDVSLGSTWLSDFPQAWAETGGMGLAVRQAPLIIPLKATSTPVSIQQYPMSHEARLGIKPHIQRLLDQGILVPCQSPWNTPLLPVKKPGTNDYRPVQDLREVNKRVEDIHPTVPNPYNLLSGLPPSHQWYTVLDLKDAFFCLRLHPTSQPLFAFEWRDPGMGISGQLTWTRLPQGFKNSPTLFDEALHRDLADFRIQHPDLILLQYVDDILLAATSELDCQQGTRALLQTLGDLGYRASAKKAQICQKQVKYLGYLLREGQRWLTEARKETVMGQPVPKTPRQLREFLGTAGFCRLWIPGFAEMAAPLYPLTKTGTLFSWGPDQQKAYQEIKQALLTAPALGLPDLTKPFELFVDEKQGYAKGVLTQKLGPWRRPVAYLSKKLDPVAAGWPPCLRMVAAIAVLTKDAGKLTMGQPLVILAPHAVEALVKQPPDRWLSNARMTHYQAMLLDTDRVQFGPVVALNPATLLPLPEEGAPHDCLEILAETHGTRPDLTDQPIPDADHTWYTDGSSFLQEGQRKAGAAVTTETEVIWAGALPAGTSAQRAELIALTQALKMAEGKRLNVYTDSRYAFATAHIHGEIYRRRGLLTSEGREIKNKSEILALLKALFLPKRLSIIHCLGHQKGDSAEARGNRLADQAAREAAIKTPPDTSTLL

SEQ ID NO: 8057 - protein, 671 aa, Murine leukemia virus; identical to SEQ ID NO: 8056

SEQ ID NO: 8058 - protein, 671 aa, synthetic construct
TLGIEDEYRLHETSTEPDVSLGSTWLSDFPQAWAETGGMGLAVRQAPLIIPLKATSTPVSIQQYPMSHEARLGIKPHIQRLLDQGILVPCQSPWNTPLLPVKKPGTNDYRPVQDLREVNKRVEDIHPTVPNPYNLLSGLPPSHQWYTVLDLKDAFFCLRLHPTSQPLFAFEWRDPGMGISGQLTWTRLPQGFKNSPTLFNEALHRDLADFRIQHPDLILLQYVDDILLAATSELDCQQGTRALLQTLGDLGYRASAKKAQICQKQVKYLGYLLREGQRWLTEARKETVMGQPVPKTPRQLREFLGTAGFCRLWIPGFAEMAAPLYPLTKPGTLFSWGPDQQKAYQEIKQALLTAPALGLPDLTKPFELFVDEKQGYAKGVLTQKLGPWRRPVAYLSKKLDPVAAGWPPCLRMVAAIAVLTKDAGKLTMGQPLVILAPHAVEALVKQPPDRWLSNARMTHYQAMLLDTDRVQFGPVVALNPATLLPLPEEGAPHDCLEILAETHGTRPDLTDQPIPDADHTWYTDGSSFLQEGQRKAGAAVTTETEVIWAGALPAGTSAQRAELIALTQALKMAEGKRLNVYTDSRYAFATAHIHGEIYRRRGWLTSEGREIKNKSEILALLKALFLPKRLSIIHCLGHQKGDSAEARGNRLADQAAREAAIKTPPDTSTLL

SEQ ID NO: 8059 - protein, 671 aa, synthetic construct; identical to SEQ ID NO: 8058

SEQ ID NO: 8060 - protein, 671 aa, synthetic construct
LGIEDEYRLHETSTEPDVSLGSTWLSDFPQAWAETGGMGLAVRQAPLIIPLKATSTPVSIQQYPMSHEARLGIKPHIQRLLDQGILVPCQSPWNTPLLPVKKPGTNDYRPVQDLREVNKRVEDIHPTVPNPYNLLSGLPPSHQWYTVLDLKDAFFCLRLHPTSQPLFAFEWRDPGMGISGQLTWTRLPQGFKNSPTLFNEALHRDLADFRIQHPDLILLQYVDDILLAATSELDCQQGTRALLQTLGDLGYRASAKKAQICQKQVKYLGYLLREGQRWLTEARKETVMGQPVPKTPRQLREFLGKAGFCRLFIPGFAEMAAPLYPLTKPGTLFSWGPDQQKAYQEIKQALLTAPALGLPDLTKPFELFVDEKQGYAKGVLTQKLGPWRRPVAYLSKKLDPVAAGWPPCLRMVAAIAVLTKDAGKLTMGQPLVILAPHAVEALVKQPPDRWLSNARMTHYQAMLLDTDRVQFGPVVALNPATLLPLPEEGAPHDCLEILAETHGTRPDLTDQPIPDADHTWYTDGSSFLQEGQRKAGAAVTTETEVIWAGALPAGTSAQRAELIALTQALKMAEGKRLNVYTDSRYAFATAHIHGEIYRRRGWLTSEGREIKNKSEILALLKALFLPKRLSIIHCLGHQKGDSAEARGNRLADQAAREAAIKTPPDTSTLLI

SEQ ID NO: 8061 - protein, 671 aa, synthetic construct; identical to SEQ ID NO: 8060

SEQ ID NO: 8062 - protein, 671 aa, unidentified
TLNIEDEYRLHETSKEPDVSLGSTWLSDFPQAWAETGGMGLAVRQAPLIIPLKATSTPVSIKQYPMSQEARLGIKPHIQRLLDQGILVPCQSPWNTPLLPVKKPGTNDYRPVQDLREVNKRVEDIHPTVPNPYNLLSGLPPSHQWYTVLDLKDAFFCLRLHPTSQPLFAFEWRDPEMGISGQLTWTRLPQGFKNSPTLFDEALHRDLAGFRIQHPDLILLQYVDDLLLAATSELDCQQGTRALLQTLGDLGYRASAKKAQICQKQVKYLGYLLKEGQRWLTEARKETVMGQPIPKTPRQLREFLGTAGFCRLWIPGFAEMAAPLYPLTKTGTLFNWGPDQQKAFQEIKQALLTAPALGLPDLTKPFELFVDEKQGYAKGVLTQKLGPWRRPVAYLSKKLDPVAAGWPPCLRMVAAIAVLTKDAGKLTMGQPLVILAPHAVEALVKQPPDRWLSNARMTHYQALLLDTDRVQFGPVVALNPATLLPLPEEGLQHDCLDILAEAHGTRSDLMDQPLPDADHTWYTDGSSFLQEGQRKAGAAVTTETEVIWARALPAGTSAQRAELIALTQALKMAEGKKLNVYTDSRYAFATAHIHGEIYRRRGLLTSEGKEIKNKDEILALLKALFLPKRLSIIHCPGHQKGNSAEARGNRMADQAAREVATRETPETSTLL

SEQ ID NO: 8063 - protein, 671 aa, synthetic construct
TLNIEDEYRLHETSKEPDVSLGSTWLSDFPQAWAETGGMGLAVRQAPLIIPLKATSTPVSIKQYPMSQEARLGIKPHIQRLLDQGILVPCQSPWNTPLLPVKKPGTNDYRPVQDLREVNKRVEDIHPTVPNPYNLLSGLPPSHQWYTVLDLKDAFFCLRLHPTSQPLFAFEWRDPEMGISGQLTWTRLPQGFKNSPTLFNEALHRDLAGFRIQHPDLILLQYVDDLLLAATSELDCQQGTRALLQTLGDLGYRASAKKAQICQKQVKYLGYLLKEGQRWLTEARKETVMGQPIPKTPRQLREFLGTAGFCRLWIPGFAEMAAPLYPLTKPGTLFNWGPDQQKAFQEIKQALLTAPALGLPDLTKPFELFVDEKQGYAKGVLTQKLGPWRRPVAYLSKKLDPVAAGWPPCLRMVAAIAVLTKDAGKLTMGQPLVILAPHAVEALVKQPPDRWLSNARMTHYQALLLDTDRVQFGPVVALNPATLLPLPEEGLQHDCLDILAEAHGTRSDLMDQPLPDADHTWYTDGSSFLQEGQRKAGAAVTTETEVIWARALPAGTSAQRAELIALTQALKMAEGKKLNVYTDSRYAFATAHIHGEIYRRRGWLTSEGKEIKNKDEILALLKALFLPKRLSIIHCPGHQKGNSAEARGNRMADQAAREVATRETPETSTLL

SEQ ID NO: 8064 - protein, 671 aa, synthetic construct
TLNIEDEYRLHETSKEPDVSLGSTWLSDFPQAWAETGGMGLAVRQAPLIIPLKATSTPVSIKQYPMSQEARLGIKPHIQRLLDQGILVPCQSPWNTPLLPVKKPGTNDYRPVQDLREVNKRVEDIHPTVPNPYNLLSGLPPSHQWYTVLDLKDAFFCLRLHPTSQPLFAFEWRDPEMGISGQLTWTRLPQGFKNSPTLFNEALHRDLAGFRIQHPDLILLQYVDDLLLAATSELDCQQGTRALLQTLGDLGYRASAKKAQICQKQVKYLGYLLKEGQRWLTEARKETVMGQPIPKTPRQLREFLGKAGFCRLFIPGFAEMAAPLYPLTKPGTLFNWGPDQQKAFQEIKQALLTAPALGLPDLTKPFELFVDEKQGYAKGVLTQKLGPWRRPVAYLSKKLDPVAAGWPPCLRMVAAIAVLTKDAGKLTMGQPLVILAPHAVEALVKQPPDRWLSNARMTHYQALLLDTDRVQFGPVVALNPATLLPLPEEGLQHDCLDILAEAHGTRSDLMDQPLPDADHTWYTDGSSFLQEGQRKAGAAVTTETEVIWARALPAGTSAQRAELIALTQALKMAEGKKLNVYTDSRYAFATAHIHGEIYRRRGWLTSEGKEIKNKDEILALLKALFLPKRLSIIHCPGHQKGNSAEARGNRMADQAAREVATRETPETSTLL

SEQ ID NO: 8065 - protein, 671 aa, unidentified
TLNIEDEYRLHETSKGPDVPLGSTWLSDFPQAWAETGGMGLAFRQAPLIISLKATSTPVSIKQYPMSQEARLGIKPHIQRLLDQGILVPCQSPWNTPLLPVKKPGTNDYRPVQDLREVNKRVEDIHPTVPNPYNLLSGLPPSHQWYTVLDLKDAFFCLRLHPTSQSLFAFEWKDPEMGISGQLTWTRLPQGFKNSPTLFDEALHRDLADFRIQHPDLILLQYVDDLLLAATSELDCQQGTRALLQTLGDLGYRASAKKAQICQKQVKYLGYLLKEGQRWLTEARKETVMGQPTPKTPRQLREFLGTAGLCRLWIPGFAEMAAPLYPLTKTGTLFKWGPDQQKAYQEIKQALLTAPALGLPDLTKPFELFVDEKQGYAKGVLTQKLGPWRRPVAYLSKKLDPVAAGWPPCLRMVAAIAVLTKDVGKLTMGQPLVILAPHAVEALVKQPPDRWLSNARMTHYQALLLDTDRVQFGPIVALNPATLLPLPEEGLQHDCLDILAEAHGTRPDLTDQPLPDADHTWYTDGSSFLQEGQRRAGAAVTTETEVIWAKALPAGTSAQRAELIALTQALKMAAGKKLNVYTDSRYAFATAHIHGEIYRRRGLLTSEGKEIKNKDEILALLKALFLPKRLSIIHCPGHQKGNHAEARGNRMADQAAREVATRETPETSTLL

SEQ ID NO: 8066 - protein, 671 aa, synthetic construct
TLNIEDEYRLHETSKGPDVPLGSTWLSDFPQAWAETGGMGLAFRQAPLIISLKATSTPVSIKQYPMSQEARLGIKPHIQRLLDQGILVPCQSPWNTPLLPVKKPGTNDYRPVQDLREVNKRVEDIHPTVPNPYNLLSGLPPSHQWYTVLDLKDAFFCLRLHPTSQSLFAFEWKDPEMGISGQLTWTRLPQGFKNSPTLFNEALHRDLADFRIQHPDLILLQYVDDLLLAATSELDCQQGTRALLQTLGDLGYRASAKKAQICQKQVKYLGYLLKEGQRWLTEARKETVMGQPTPKTPRQLREFLGTAGLCRLWIPGFAEMAAPLYPLTKPGTLFKWGPDQQKAYQEIKQALLTAPALGLPDLTKPFELFVDEKQGYAKGVLTQKLGPWRRPVAYLSKKLDPVAAGWPPCLRMVAAIAVLTKDVGKLTMGQPLVILAPHAVEALVKQPPDRWLSNARMTHYQALLLDTDRVQFGPIVALNPATLLPLPEEGLQHDCLDILAEAHGTRPDLTDQPLPDADHTWYTDGSSFLQEGQRRAGAAVTTETEVIWAKALPAGTSAQRAELIALTQALKMAAGKKLNVYTDSRYAFATAHIHGEIYRRRGWLTSEGKEIKNKDEILALLKALFLPKRLSIIHCPGHQKGNHAEARGNRMADQAAREVATRETPETSTLL

SEQ ID NO: 8067 - protein, 671 aa, synthetic construct
TLNIEDEYRLHETSKGPDVPLGSTWLSDFPQAWAETGGMGLAFRQAPLIISLKATSTPVSIKQYPMSQEARLGIKPHIQRLLDQGILVPCQSPWNTPLLPVKKPGTNDYRPVQDLREVNKRVEDIHPTVPNPYNLLSGLPPSHQWYTVLDLKDAFFCLRLHPTSQSLFAFEWKDPEMGISGQLTWTRLPQGFKNSPTLFNEALHRDLADFRIQHPDLILLQYVDDLLLAATSELDCQQGTRALLQTLGDLGYRASAKKAQICQKQVKYLGYLLKEGQRWLTEARKETVMGQPTPKTPRQLREFLGKAGLCRLFIPGFAEMAAPLYPLTKPGTLFKWGPDQQKAYQEIKQALLTAPALGLPDLTKPFELFVDEKQGYAKGVLTQKLGPWRRPVAYLSKKLDPVAAGWPPCLRMVAAIAVLTKDVGKLTMGQPLVILAPHAVEALVKQPPDRWLSNARMTHYQALLLDTDRVQFGPIVALNPATLLPLPEEGLQHDCLDILAEAHGTRPDLTDQPLPDADHTWYTDGSSFLQEGQRRAGAAVTTETEVIWAKALPAGTSAQRAELIALTQALKMAAGKKLNVYTDSRYAFATAHIHGEIYRRRGWLTSEGKEIKNKDEILALLKALFLPKRLSIIHCPGHQKGNHAEARGNRMADQAAREVATRETPETSTLL

SEQ ID NO: 8068 - protein, 671 aa, synthetic construct
TLNIEDEYRLHETSKGPDVPLGSTWLSDFPQAWAETGGMGLAVRQAPLIIPLKATSTPVSIKQYPMSQEARLGIKPHIQRLLDQGILVPCQSPWNTPLLPVKKPGTNDYRPVQDLREVNKRVEDIHPTVPNPYNLLSGLPPSHQWYTVLDLKDAFFCLRLHPTSQSLFAFEWRDPEMGISGQLTWTRLPQGFKNSPTLFNEALHRDLADFRIQHPDLILLQYVDDLLLAATSELDCQQGTRALLQTLGDLGYRASAKKAQICQKQVKYLGYLLKEGQRWLTEARKETVMGQPTPKTPRQLREFLGTAGFCRLWIPGFAEMAAPLYPLTKPGTLFEWGPDQQKAYQEIKQALLTAPALGLPDLTKPFELFVDEKQGYAKGVLTQKLGPWRRPVAYLSKKLDPVAAGWPPCLRMVAAIAVLTKDAGKLTMGQPLVILAPHAVEALVKQPPDRWLSNARMTHYQALLLDTDRVQFGPIVALNPATLLPLPEEGLQHDCLDILAEAHGTRPDLTDQPLPDADHTWYTDGSSFLQEGQRKAGAAVTTETEVVWAKALPAGTSAQRAELIALTQALKMAEGKKLNVYTDSRYAFATAHIHGEIYRRRGWLTSEGKEIKNKDEILALLKALFLPKRLSIIHCPGHQKGNRAEARGNRMADQAAREVATRETPETSTLL

SEQ ID NO: 8069 - protein, 671 aa, synthetic construct
TLNIEDEYRLHETSKGPDVPLGSTWLSDFPQAWAETGGMGLAVRQAPLIIPLKATSTPVSIKQYPMSQEARLGIKPHIQRLLDQGILVPCQSPWNTPLLPVKKPGTNDYRPVQDLREVNKRVEDIHPTVPNPYNLLSGLPPSHQWYTVLDLKDAFFCLRLHPTSQSLFAFEWRDPEMGISGQLTWTRLPQGFKNSPTLFNEALHRDLADFRIQHPDLILLQYVDDLLLAATSELDCQQGTRALLQTLGDLGYRASAKKAQICQKQVKYLGYLLKEGQRWLTEARKETVMGQPTPKTPRQLREFLGKAGFCRLFIPGFAEMAAPLYPLTKPGTLFEWGPDQQKAYQEIKQALLTAPALGLPDLTKPFELFVDEKQGYAKGVLTQKLGPWRRPVAYLSKKLDPVAAGWPPCLRMVAAIAVLTKDAGKLTMGQPLVILAPHAVEALVKQPPDRWLSNARMTHYQALLLDTDRVQFGPIVALNPATLLPLPEEGLQHDCLDILAEAHGTRPDLTDQPLPDADHTWYTDGSSFLQEGQRKAGAAVTTETEVVWAKALPAGTSAQRAELIALTQALKMAEGKKLNVYTDSRYAFATAHIHGEIYRRRGWLTSEGKEIKNKDEILALLKALFLPKRLSIIHCPGHQKGNRAEARGNRMADQAAREVATRETPETSTLL

SEQ ID NO: 8070 - protein, 671 aa, Murine leukemia virus; identical to SEQ ID NO: 5003

SEQ ID NO: 8071 - protein, 671 aa, Murine leukemia virus; identical to SEQ ID NO: 5003

SEQ ID NO: 8072 - protein, 671 aa, synthetic construct
TLNIEDEHRLHETSKEPDVSLGSTWLSDFPQAWAETGGMGLAVRQAPLIIPLKATSTPVSIKQYPMSQEARLGIKPHIQRLLDQGILVPCQSPWNTPLLPVKKPGTNDYRPVQDLREVNKRVEDIHPTVPNPYNLLSGLPPSHQWYTVLDLKDAFFCLRLHPTSQPLFAFEWRDPEMGISGQLTWTRLPQGFKNSPTLFNEALHRDLADFRIQHPDLILLQYVDDLLLAATSELDCQQGTRALLQTLGNLGYRASAKKAQICQKQVKYLGYLLKEGQRWLTEARKETVMGQPTPKTPRQLREFLGTAGFCRLWIPGFAEMAAPLYPLTKPGTLFNWGPDQQKAYQEIKQALLTAPALGLPDLTKPFELFVDEKQGYAKGVLTQKLGPWRRPVAYLSKKLDPVAAGWPPCLRMVAAIAVLTKDAGKLTMGQPLVILAPHAVEALVKQPPDRWLSNARMTHYQALLLDTDRVQFGPVVALNPATLLPLPEEGLQHNCLDILAEAHGTRPDLTDQPLPDADHTWYTDGSSLLQEGQRKAGAAVTTETEVIWAKALPAGTSAQRAELIALTQALKMAEGKKLNVYTDSRYAFATAHIHGEIYRRRGWLTSEGKEIKNKDEILALLKALFLPKRLSIIHCPGHQKGHSAEARGNRMADQAARKAAITETPDTSTLL

SEQ ID NO: 8073 - protein, 671 aa, synthetic construct; identical to SEQ ID NO: 8072

SEQ ID NO: 8074 - protein, 671 aa, synthetic construct
TLNIEDEHRLHETSKEPDVSLGSTWLSDFPQAWAETGGMGLAVRQAPLIIPLKATSTPVSIKQYPMSQEARLGIKPHIQRLLDQGILVPCQSPWNTPLLPVKKPGTNDYRPVQDLREVNKRVEDIHPTVPNPYNLLSGLPPSHQWYTVLDLKDAFFCLRLHPTSQPLFAFEWRDPEMGISGQLTWTRLPQGFKNSPTLFNEALHRDLADFRIQHPDLILLQYVDDLLLAATSELDCQQGTRALLQTLGNLGYRASAKKAQICQKQVKYLGYLLKEGQRWLTEARKETVMGQPTPKTPRQLREFLGKAGFCRLFIPGFAEMAAPLYPLTKPGTLFNWGPDQQKAYQEIKQALLTAPALGLPDLTKPFELFVDEKQGYAKGVLTQKLGPWRRPVAYLSKKLDPVAAGWPPCLRMVAAIAVLTKDAGKLTMGQPLVILAPHAVEALVKQPPDRWLSNARMTHYQALLLDTDRVQFGPVVALNPATLLPLPEEGLQHNCLDILAEAHGTRPDLTDQPLPDADHTWYTDGSSLLQEGQRKAGAAVTTETEVIWAKALPAGTSAQRAELIALTQALKMAEGKKLNVYTDSRYAFATAHIHGEIYRRRGWLTSEGKEIKNKDEILALLKALFLPKRLSIIHCPGHQKGHSAEARGNRMADQAARKAAITETPDTSTLL

SEQ ID NO: 8075 - protein, 671 aa, synthetic construct; identical to SEQ ID NO: 8074

SEQ ID NO: 8076 - protein, 691 aa, synthetic construct
TLNIEDEYRLHETSKEPDVSLGSTWLSDFPQAWAETGGMGLAVRQAPLIIPLKATSTPVSIKQYPMSQEARLGIKPHIQRLLDQGILVPCQSPWNTPLLPVKKPGTNDYRPVQDLREVNKRVEDIHPTVPNPYNLLSGLPPSHQWYTVLDLKDAFFCLRLHPTSQPLFAFEWRDPEMGISGQLTWTRLPQGFKNSPTLFNEALHRDLADFRIQHPDLILLQYVDDLLLAATSELDCQQGTRALLQTLGNLGYRASAKKAQICQKQVKYLGYLLKEGQRWLTEARKETVMGQPTPKTPRQLREFLGKAGFCRLFIPGFAEMAAPLYPLTKPGTLFNWGPDQQKAYQEIKQALLTAPALGLPDLTKPFELFVDEKQGYAKGVLTQKLGPWRRPVAYLSKKLDPVAAGWPPCLRMVAAIAVLTKDAGKLTMGQPLVILAPHAVEALVKQPPDRWLSNARMTHYQALLLDTDRVQFGPVVALNPATLLPLPEEGLQHNCLDILAEAHGTRPDLTDQPLPDADHTWYTDGSSLLQEGQRKAGAAVTTETEVIWAKALPAGTSAQRAELIALTQALKMAEGKKLNVYTDSRYAFATAHIHGEIYRRRGWLTSEGKEIKNKDEILALLKALFLPKRLSIIHCPGHQKGHSAEARGNRMADQAARKAAITETPDTSTLLIENSSPSGGSKRTADGSEFE

SEQ ID NO: 8077 - protein, 691 aa, synthetic construct; identical to SEQ ID NO: 8076

SEQ ID NO: 8078 - protein, 671 aa, unidentified
TLNIEDEYRLHEISTEPDVSPGSTWLSDFPQAWAETGGMGLAVRQAPLIIPLKATSTPVSIKQYPMSQEAKLGIKPHIQRLLDQGILVPCQSPWNTPLLPVKKPGTNDYRPVQGLREVNKRVEDIHPTVPNPYNLLSGLPTSHRWYTVLDLKDAFFCLRLHPTSQPLFASEWRDPGMGISGQLTWTRLPQGFKNSPTLFDEALHRGLADFRIQHPDLILLQYVDDLLLAATSELDCQQGTRALLKTLGNLGYRASAKKAQICQKQVKYLGYLLREGQRWLTEARKETVMGQPTPKTPRQLREFLGTAGFCRLWIPRFAEMAAPLYPLTKTGTLFNWGPDQQKAYHEIKQALLTAPALGLPDLTKPFELFVDEKQGYAKGVLTQKLGPWRRPVAYLSKKLDPVAAGWPPCLRMVAAIAVLTKDAGKLTMGQPLVILAPHAVEALVKQPPDRWLSNARMTHYQAMLLDTDRVQFGPVVALNPATLLPLPEEGAPHDCLEILAETHGTEPDLTDQPIPDADHTWYTDGSSFLQEGQRKAGAAVTTETEVIWARALPAGTSAQRAELIALTQALKMAEGKRLNVYTDSRYAFATAHIHGEIYKRRGLLTSEGREIKNKSEILALLKALFLPKRLSIIHCLGHQKGDSAEARGNRLADQAAREAAIKTPPDTSTLL

SEQ ID NO: 8079 - protein, 671 aa, synthetic construct
TLNIEDEYRLHEISTEPDVSPGSTWLSDFPQAWAETGGMGLAVRQAPLIIPLKATSTPVSIKQYPMSQEAKLGIKPHIQRLLDQGILVPCQSPWNTPLLPVKKPGTNDYRPVQGLREVNKRVEDIHPTVPNPYNLLSGLPTSHRWYTVLDLKDAFFCLRLHPTSQPLFASEWRDPGMGISGQLTWTRLPQGFKNSPTLFNEALHRGLADFRIQHPDLILLQYVDDLLLAATSELDCQQGTRALLKTLGNLGYRASAKKAQICQKQVKYLGYLLREGQRWLTEARKETVMGQPTPKTPRQLREFLGTAGFCRLWIPRFAEMAAPLYPLTKPGTLFNWGPDQQKAYHEIKQALLTAPALGLPDLTKPFELFVDEKQGYAKGVLTQKLGPWRRPVAYLSKKLDPVAAGWPPCLRMVAAIAVLTKDAGKLTMGQPLVILAPHAVEALVKQPPDRWLSNARMTHYQAMLLDTDRVQFGPVVALNPATLLPLPEEGAPHDCLEILAETHGTEPDLTDQPIPDADHTWYTDGSSFLQEGQRKAGAAVTTETEVIWARALPAGTSAQRAELIALTQALKMAEGKRLNVYTDSRYAFATAHIHGEIYKRRGWLTSEGREIKNKSEILALLKALFLPKRLSIIHCLGHQKGDSAEARGNRLADQAAREAAIKTPPDTSTLL

SEQ ID NO: 8080 - protein, 691 aa, Mouse mammary tumor virus
WVQEISDSRPMLHIYLNGRRFLGLLNTGADKTCIAGRDWPANWPIHQTESSLQGLGMACGVARSSQPLRWQHEDKSGIIHPFVIPTLPFTLWGRDIMKDIKVRLMTDSPDDSQDLMIGAIESNLFADQISWKSDQPVWLNQWPLKQEKLQALQQLVTEQLQLGHLEESNSPWNTPVFVIKKKSGKWRLLQDLRAVNATMHDMGALQPGLPSPVAVPKGWEIIIIDLQDCFFNIKLHPEDCKRFAFSVPSPNFKRPYQRFQWKVLPQGMKNSPTLCQKFVDKAILTVRDKYQDSYIVHYMDDILLAHPSRSIVDEILTSMIQALNKHGLVVSTEKIQKYDNLKYLGTHIQGDSVSYQKLQIRTDKLRTLNDFQKLLGNINWIRPFLKLTTGELKPLFEILNGDSNPISTRKLTPEACKALQLMNERLSTARVKRLDLSQPWSLCILKTEYTPTACLWQDGVVEWIHLPHISPKVITPYDIFCTQLIIKGRHRSKELFSKDPDYIVVPYTKVQFDLLLQEKEDWPISLLGFLGEVHFHLPKDPLLTFTLQTAIIFPHMTSTTPLEKGIVIFTDGSANGRSVTYIQGREPIIKENTQNTAQQAEIVAVITAFEEVSQPFNLYTDSKYVTGLFPEIETATLSPRTKIYTELKHLQRLIHKRQEKFYIGHIRGHTGLPGPLAQGNAYADSLTRILT

SEQ ID NO: 8081 - protein, 691 aa, Mouse mammary tumor virus; identical to SEQ ID NO: 8080

SEQ ID NO: 8082 - protein, 691 aa, synthetic construct
WVQEISDSRPMLHIYLNGRRFLGLLNTGADKTCIAGRDWPANWPIHQTESSLQGLGMACGVARSSQPLRWQHEDKSGIIHPFVIPTLPFTLWGRDIMKDIKVRLMTDSPDDSQDLMIGAIESNLFADQISWKSDQPVWLNQWPLKQEKLQALQQLVTEQLQLGHLEESNSPWNTPVFVIKKKSGKWRLLQDLRAVNATMHDMGALQPGLPSPVAVPKGWEIIIIDLQDCFFNIKLHPEDCKRFAFSVPSPNFKRPYQRFQWKVLPQGMKNSPTLCQKFVDKAILTVRDKYQDSYIVHYMDDILLAHPSRSIVDEILTSMIQALNKHGLVVSTEKIQKYDNLKYLGTHIQGDSVSYQKLQIRTDKLRTLNDFQKLLGNINWIRPFLKLTTGELKPLFEILNPDSNPISTRKLTPEACKALQLMNERLSTARVKRLDLSQPWSLCILKTEYTPTACLWQDGVVEWIHLPHISPKVITPYDIFCTQLIIKGRHRSKELFSKDPDYIVVPYTKVQFDLLLQEKEDWPISLLGFLGEVHFHLPKDPLLTFTLQTAIIFPHMTSTTPLEKGIVIFTDGSANGRSVTYIQGREPIIKENTQNTAQQAEIVAVITAFEEVSQPFNLYTDSKYVTGLFPEIETATLSPRTKIYTELKHLQRLIHKRQEKFYIGHIRGHTGLPGPLAQGNAYADSLTRILT

SEQ ID NO: 8083 - protein, 691 aa, synthetic construct
VQEISDSRPMLHIYLNGRRFLGLLDTGADKTCIAGRDWPANWPIHQTESSLQGLGMACGVARSSQPLRWQHEDKSGIIHPFVIPTLPFTLWGRDIMKDIKVRLMTDSPDDSQDLMIGAIESNLFADQISWKSDQPVWLNQWPLKQEKLQALQQLVTEQLQLGHLEESNSPWNTPVFVIKKKSGKWRLLQDLRAVNATMHDMGALQPGLPSPVAVPKGWEIIIIDLQDCFFNIKLHPEDCKRFAFSVPSPNFKRPYQRFQWKVLPQGMKNSPTLCQKFVDKAILTVRDKYQDSYIVHYMDDILLAHPSRSIVDEILTSMIQALNKHGLVVSTEKIQKYDNLKYLGTHIQGDSVSYQKLQIRTDKLRTLNDFQKLLGNINWIRPFLKLTTGELKPLFEILNPDSNPISTRKLTPEACKALQLMNERLSTARVKRLDLSQPWSLCILKTEYTPTACLWQDGVVEWIHLPHISPKVITPYDIFCTQLIIKGRHRSKELFSKDPDYIVVPYTKVQFDLLLQEKEDWPISLLGFLGEVHFHLPKDPLLTFTLQTAIIFPHMTSTTPLEKGIVIFTDGSANGRSVTYIQGREPIIKENTQNTAQQAEIVAVITAFEEVSQPFNLYTDSKYVTGLFPEIETATLSPRTKIYTELKHLQRLIHKRQEKFYIGHIRGHTGLPGPLAQGNAYADSLTRILTA

SEQ ID NO: 8084 - protein, 691 aa, synthetic construct; identical to SEQ ID NO: 8083

SEQ ID NO: 8085 - protein, 691 aa, synthetic construct
WVQEISDSRPMLHIYLNGRRFLGLLNTGADKTCIAGRDWPANWPIHQTESSLQGLGMACGVARSSQPLRWQHEDKSGIIHPFVIPTLPFTLWGRDIMKDIKVRLMTDSPDDSQDLMIGAIESNLFADQISWKSDQPVWLNQWPLKQEKLQALQQLVTEQLQLGHLEESNSPWNTPVFVIKKKSGKWRLLQDLRAVNATMHDMGALQPGLPSPVAPPKGWEIIIIDLQDCFFNIKLHPEDCKRFAFSVPSPNFKRPYQRFQWKVLPQGMKNSPTLCQKFVDKAILTVRDKYQDSYIVHYMDDILLAHPSRSIVDEILTSMIQALNKHGLVVSTEKIQKYDNLKYLGTHIQGDSVSYQKLQIRTDKLRTLNDFQKLLGNINWIRPFLKLTTGELKPLFEILNPDSNPISTRKLTPEACKALQLMNERLSTARVKRLDLSQPWSLCILKTEYTPTACLWQDGVVEWIHLPHISPKVITPYDIFCTQLIIKGRHRSKELFSKDPDYIVVPYTKVQFDLLLQEKEDWPISLLGFLGEVHFHLPKDPLLTFTLQTAIIFPHMTSTTPLEKGIVIFTDGSANGRSVTYIQGREPIIKENTQNTAQQAEIVAVITAFEEVSQPFNLYTDSKYVTGLFPEIETATLSPRTKIYTELKHLQRLIHKRQEKFYIGHIRGHTGLPGPLAQGNAYADSLTRILT

SEQ ID NO: 8086 - protein, 691 aa, synthetic construct; identical to SEQ ID NO: 8085

SEQ ID NO: 8087 - protein, 691 aa, synthetic construct
VQEISDSRPMLHIYLNGRRFLGLLDTGADKTCIAGRDWPANWPIHQTESSLQGLGMACGVARSSQPLRWQHEDKSGIIHPFVIPTLPFTLWGRDIMKDIKVRLMTDSPDDSQDLMIGAIESNLFADQISWKSDQPVWLNQWPLKQEKLQALQQLVTEQLQLGHLEESNSPWNTPVFVIKKKSGKWRLLQDLRAVNATMHDMGALQPGLPSPPAVPKGWEIIIIDLQDCFFNIKLHPEDCKRFAFSVPSPNFKRPYQRFQWKVLPQGMKNSPTLCQKFVDKAILTVRDKYQDSYIVHYMDDILLAHPSRSIVDEILTSMIQALNKHGLVVSTEKIQKYDNLKYLGTHIQGDSVSYQKLQIRTDKLRTLNDFQKLLGNINWIRPFLKLTTGELKPLFEILNPDSNPISTRKLTPEACKALQLMNERLSTARVKRLDLSQPWSLCILKTEYTPTACLWQDGVVEWIHLPHISPKVITPYDIFCTQLIIKGRHRSKELFSKDPDYIVVPYTKVQFDLLLQEKEDWPISLLGFLGEVHFHLPKDPLLTFTLQTAIIFPHMTSTTPLEKGIVIFTDGSANGRSVTYIQGREPIIKENTQNTAQQAEIVAVITAFEEVSQPFNLYTDSKYVTGLFPEIETATLSPRTKIYTELKHLQRLIHKRQEKFYIGHIRGHTGLPGPLAQGNAYADSLTRILTA

SEQ ID NO: 8088 - protein, 691 aa, synthetic construct; identical to SEQ ID NO: 8087

SEQ ID NO: 8089 - protein, 691 aa, Mouse mammary tumor virus
VQEISDSRPMLHIYLNGRRFLGLLDTGADKTCIAGRDWPANWPIHQTESSLQGLGMACGVARSSQPLRWQHEDKSGIIHPFVIPTLPFTLWGRDIMKDIKVRLMTDSPDDSQDLMIGAIESNLFADQISWKSDQPVWLNQWPLKQEKLQALQQLVTEQLQLGHLEESNSPWNTPVFVIKKKSGKWRLLQDLRAVNATMHDMGALQPGLPSPVAVPKGWEIIIIDLQDCFFNIKLHPEDCKRFAFSVPSPNFKRPYQRFQWKVLPQGMKNSPTLCQKFVDKAILTVRDKYQDSYIVHYMDDILLAHPSRSIVDEILTSMIQALNKHGLVVSTEKIQKYDNLKYLGTHIQGDSVSYQKLQIRTDKLRTLNDFQKLLGNINWIRPFLKLTTGELKPLFEILNGDSNPISTRKLTPEACKALQLMNERLSTARVKRLDLSQPWSLCILKTEYTPTACLWQDGVVEWIHLPHISPKVITPYDIFCTQLIIKGRHRSKELFSKDPDYIVVPYTKVQFDLLLQEKEDWPISLLGFLGEVHFHLPKDPLLTFTLQTAIIFPHMTSTTPLEKGIVIFTDGSANGRSVTYIQGREPIIKENTQNTAQQAEIVAVITAFEEVSQPFNLYTDSKYVTGLFPEIETATLSPRTKIYTELKHLQRLIHKRQEKFYIGHIRGHTGLPGPLAQGNAYADSLTRILTA

SEQ ID NO: 8090 - protein, 691 aa, Mouse mammary tumor virus; identical to SEQ ID NO: 8089

SEQ ID NO: 8091 - protein, 599 aa, Mouse mammary tumor virus
GRDIMKDIKVRLMTDSPDDSQDLMIGAIESNLFADQISWKSDQPVWLNQWPLKQEKLQALQQLVTEQLQLGHLEESNSPWNTPVFVIKKKSGKWRLLQDLRAVNATMHDMGALQPGLPSPVAVPKGWEIIIIDLQDCFFNIKLHPEDCKRFAFSVPSPNFKRPYQRFQWKVLPQGMKNSPTLCQKFVDKAILTVRDKYQDSYIVHYMDDILLAHPSRSIVDEILTSMIQALNKHGLVVSTEKIQKYDNLKYLGTHIQGDSVSYQKLQIRTDKLRTLNDFQKLLGNINWIRPFLKLTTGELKPLFEILNGDSNPISTRKLTPEACKALQLMNERLSTARVKRLDLSQPWSLCILKTEYTPTACLWQDGVVEWIHLPHISPKVITPYDIFCTQLIIKGRHRSKELFSKDPDYIVVPYTKVQFDLLLQEKEDWPISLLGFLGEVHFHLPKDPLLTFTLQTAIIFPHMTSTTPLEKGIVIFTDGSANGRSVTYIQGREPIIKENTQNTAQQAEIVAVITAFEEVSQPFNLYTDSKYVTGLFPEIETATLSPRTKIYTELKHLQRLIHKRQEKFYIGHIRGHTGLPGPLAQGNAYADSLTRILT

SEQ ID NO: 8092 - protein, 599 aa, Mouse mammary tumor virus; identical to SEQ ID NO: 8091

SEQ ID NO: 8093 - protein, 599 aa, synthetic construct
GRDIMKDIKVRLMTDSPDDSQDLMIGAIESNLFADQISWKSDQPVWLNQWPLKQEKLQALQQLVTEQLQLGHLEESNSPWNTPVFVIKKKSGKWRLLQDLRAVNATMHDMGALQPGLPSPVAVPKGWEIIIIDLQDCFFNIKLHPEDCKRFAFSVPSPNFKRPYQRFQWKVLPQGMKNSPTLCQKFVDKAILTVRDKYQDSYIVHYMDDILLAHPSRSIVDEILTSMIQALNKHGLVVSTEKIQKYDNLKYLGTHIQGDSVSYQKLQIRTDKLRTLNDFQKLLGNINWIRPFLKLTTGELKPLFEILNPDSNPISTRKLTPEACKALQLMNERLSTARVKRLDLSQPWSLCILKTEYTPTACLWQDGVVEWIHLPHISPKVITPYDIFCTQLIIKGRHRSKELFSKDPDYIVVPYTKVQFDLLLQEKEDWPISLLGFLGEVHFHLPKDPLLTFTLQTAIIFPHMTSTTPLEKGIVIFTDGSANGRSVTYIQGREPIIKENTQNTAQQAEIVAVITAFEEVSQPFNLYTDSKYVTGLFPEIETATLSPRTKIYTELKHLQRLIHKRQEKFYIGHIRGHTGLPGPLAQGNAYADSLTRILT

SEQ ID NO: 8094 - protein, 599 aa, synthetic construct; identical to SEQ ID NO: 8093

SEQ ID NO: 8095 - protein, 599 aa, synthetic construct
GRDIMKDIKVRLMTDSPDDSQDLMIGAIESNLFADQISWKSDQPVWLNQWPLKQEKLQALQQLVTEQLQLGHLEESNSPWNTPVFVIKKKSGKWRLLQDLRAVNATMHDMGALQPGLPSPVAPPKGWEIIIIDLQDCFFNIKLHPEDCKRFAFSVPSPNFKRPYQRFQWKVLPQGMKNSPTLCQKFVDKAILTVRDKYQDSYIVHYMDDILLAHPSRSIVDEILTSMIQALNKHGLVVSTEKIQKYDNLKYLGTHIQGDSVSYQKLQIRTDKLRTLNDFQKLLGNINWIRPFLKLTTGELKPLFEILNPDSNPISTRKLTPEACKALQLMNERLSTARVKRLDLSQPWSLCILKTEYTPTACLWQDGVVEWIHLPHISPKVITPYDIFCTQLIIKGRHRSKELFSKDPDYIVVPYTKVQFDLLLQEKEDWPISLLGFLGEVHFHLPKDPLLTFTLQTAIIFPHMTSTTPLEKGIVIFTDGSANGRSVTYIQGREPIIKENTQNTAQQAEIVAVITAFEEVSQPFNLYTDSKYVTGLFPEIETATLSPRTKIYTELKHLQRLIHKRQEKFYIGHIRGHTGLPGPLAQGNAYADSLTRILT

SEQ ID NO: 8096 - protein, 599 aa, synthetic construct; identical to SEQ ID NO: 8095

SEQ ID NO: 8097 - protein, 585 aa, Mason-Pfizer monkey virus
LTAAIDILAPQQCAEPITWKSDEPVWVDQWPLTNDKLAAAQQLVQEQLEAGHITESSSPWNTPIFVIKKKSGKWRLLQDLRAVNATMVLMGALQPGLPSPVAIPQGYLKIIIDLKDCFFSIPLHPSDQKRFAFSLPSTNFKEPMQRFQWKVLPQGMANSPTLCQKYVATAIHKVRHAWKQMYIIHYMDDILIAGKDGQQVLQCFDQLKQELTAAGLHIAPEKVQLQDPYTYLGFELNGPKITNQKAVIRKDKLQTLNDFQKLLGDINWLRPYLKLTTGDLKPLFDTLKGDSDPNSHRSLSKEALASLEKVETAIAEQFVTHINYSLPLIFLIFNTALTPTGLFWQDNPIMWIHLPASPKKVLLPYYDAIADLIILGRDHSKKYFGIEPSTIIQPYSKSQIDWLMQNTEMWPIACASFVGILDNHYPPNKLIQFCKLHTFVFPQIISKTPLNNALLVFTDGSSTGMAAYTLTDTTIKFQTNLNSAQLVELQALIAVLSAFPNQPLNIYTDSAYLAHSIPLLETVAQIKHISETAKLFLQCQQLIYNRSIPFYIGHVRAHSGLPGPIAQGNQRADLATKIVASNINT

SEQ ID NO: 8098 - protein, 585 aa, synthetic construct
LTAAIDILAPQQCAEPITWKSDEPVWVDQWPLTNDKLAAAQQLVQEQLEAGHITESSSPWNTPIFVIKKKSGKWRLLQDLRAVNATMVLMGALQPGLPSPVAPPQGYLKIIIDLKDCFFSIPLHPSDQKRFAFSLPSTNFKEPMQRFQWKVLPQGMANSPTLCQKYVATAIHKVRHAWKQMYIIHYMDDILIAGKDGQQVLQCFDQLKQELTAAGLHIAPEKVQLQDPYTYLGFELNGPKITNQKAVIRKDKLQTLNDFQKLLGDINWLRPYLKLTTGDLKPLFDTLKPDSDPNSHRSLSKEALASLEKVETAIAEQFVTHINYSLPLIFLIFNTALTPTGLFWQDNPIMWIHLPASPKKVLLPYYDAIADLIILGRDHSKKYFGIEPSTIIQPYSKSQIDWLMQNTEMWPIACASFVGILDNHYPPNKLIQFCKLHTFVFPQIISKTPLNNALLVFTDGSSTGMAAYTLTDTTIKFQTNLNSAQLVELQALIAVLSAFPNQPLNIYTDSAYLAHSIPLLETVAQIKHISETAKLFLQCQQLIYNRSIPFYIGHVRAHSGLPGPIAQGNQRADLATKIVASNINT

SEQ ID NO: 8099 - protein, 665 aa, unidentified
TLQLDDEYRLYSPLVKPDQNIQFWLEQFPQAWAETAGMGLAKQVPPQVIQLKASATPVSVRQYPLSKEAQEGIRPHVQRLIQQGILVPVQSPWNTPLLPVRKPGTNDYRPVQDLREVNKRVQDIHPTVPNPYNLLCALPPQRSWYTVLDLKDAFFCLRLHPTSQPLFAFEWRDPGTGRTGQLTWTRLPQGFKNSPTIFDEALHRDLANFRIQHPQVTLLQYVDDLLLAGATKQDCLEGTKALLLELSDLGYRASAKKAQICRREVTYLGYSLRDGQRWLTEARKKTVVQIPAPTTAKQVREFLGTAGFCRLWIPGFATLAAPLYPLTKEKGEFSWAPEHQKAFDAIKKALLSAPALALPDVTKPFTLYVDERKGVARGVLTQTLGPWRRPVAYLSKKLDPVASGWPVCLKAIAAVAILVKDADKLTLGQNITVIAPHALENIVRQPPDRWMTNARMTHYQSLLLTERVTFAPPAALNPATLLPEETDEPVTHDCHQLLIEETGVRKDLTDIPLTGEVLTWFTDGSSYVVEGKRMAGAAVVDGTRTIWASSLPEGTSAQKAELMALTQALRLAEGKSINIYTDSRYAFATAHVHGAIYKQRGLLTSAGREIKNKEEILSLLEALHLPKRLAIIHCPGHQKAKDPISRGNQMADRVAKQAAQGVNLL

SEQ ID NO: 8100 - protein, 665 aa, unidentified; identical to SEQ ID NO: 8099

SEQ ID NO: 8101 - protein, 665 aa, synthetic construct
TLQLDDEYRLYSPLVKPDQNIQFWLEQFPQAWAETAGMGLAKQVPPQVIQLKASATPVSVRQYPLSKEAQEGIRPHVQRLIQQGILVPVQSPWNTPLLPVRKPGTNDYRPVQDLREVNKRVQDIHPTVPNPYNLLCALPPQRSWYTVLDLKDAFFCLRLHPTSQPLFAFEWRDPGTGRTGQLTWTRLPQGFKNSPTIFNEALHRDLANFRIQHPQVTLLQYVDDLLLAGATKQDCLEGTKALLLELSDLGYRASAKKAQICRREVTYLGYSLRDGQRWLTEARKKTVVQIPAPTTAKQVREFLGTAGFCRLWIPGFATLAAPLYPLTKPKGEFSWAPEHQKAFDAIKKALLSAPALALPDVTKPFTLYVDERKGVARGVLTQTLGPWRRPVAYLSKKLDPVASGWPVCLKAIAAVAILVKDADKLTLGQNITVIAPHALENIVRQPPDRWMTNARMTHYQSLLLTERVTFAPPAALNPATLLPEETDEPVTHDCHQLLIEETGVRKDLTDIPLTGEVLTWFTDGSSYVVEGKRMAGAAVVDGTRTIWASSLPEGTSAQKAELMALTQALRLAEGKSINIYTDSRYAFATAHVHGAIYKQRGWLTSAGREIKNKEEILSLLEALHLPKRLAIIHCPGHQKAKDPISRGNQMADRVAKQAAQGVNLL

SEQ ID NO: 8102 - protein, 665 aa, synthetic construct; identical to SEQ ID NO: 8101

SEQ ID NO: 8103 - protein, 663 aa, synthetic construct
LDDEYRLYSPLVKPDQNIQFWLEQFPQAWAETAGMGLAKQVPPQVIQLKASATPVSVRQYPLSKEAQEGIRPHVQRLIQQGILVPVQSPWNTPLLPVRKPGTNDYRPVQDLREVNKRVQDIHPTVPNPYNLLCALPPQRSWYTVLDLKDAFFCLRLHPTSQPLFAFEWRDPGTGRTGQLTWTRLPQGFKNSPTIFNEALHRDLANFRIQHPQVTLLQYVDDLLLAGATKQDCLEGTKALLLELSDLGYRASAKKAQICRREVTYLGYSLRDGQRWLTEARKKTVVQIPAPTTAKQVREFLGKAGFCRLFIPGFATLAAPLYPLTKPKGEFSWAPEHQKAFDAIKKALLSAPALALPDVTKPFTLYVDERKGVARGVLTQTLGPWRRPVAYLSKKLDPVASGWPVCLKAIAAVAILVKDADKLTLGQNITVIAPHALENIVRQPPDRWMTNARMTHYQSLLLTERVTFAPPAALNPATLLPEETDEPVTHDCHQLLIEETGVRKDLTDIPLTGEVLTWFTDGSSYVVEGKRMAGAAVVDGTRTIWASSLPEGTSAQKAELMALTQALRLAEGKSINIYTDSRYAFATAHVHGAIYKQRGWLTSAGREIKNKEEILSLLEALHLPKRLAIIHCPGHQKAKDPISRGNQMADRVAKQAAQGVNLLP

SEQ ID NO: 8104 - protein, 663 aa, synthetic construct; identical to SEQ ID NO: 8103

SEQ ID NO: 8105 - protein, 751 aa, synthetic construct
MDPLQLLQPLEAEIKGTKLKAHWNSGATITCVPEAFLEDERPIQTMLIKTIHGEKQQDVYYLTFKVQGRKVEAEVLASPYDYILLNPSDVPWLMKKPLQLTVLVPLHEYQERLLQQTALPKEQKELLQKLFLKYDALWQHWENQVGHRRIKPHNIATGTLAPRPQKQYPINPKAKPSIQIVIDDLLKQGVLIQQNSTMNTPVYPVPKPDGKWRMVLDYREVNKTIPLIAAQNQHSAGILSSIYRGKYKTTLDLTNGFWAHPITPESYWLTAFTWQGKQYCWTRLPQGFLNSPALFTADVVDLLKEIPNVQAYVDDIYISHDDPQEHLEQLEKIFSILLNAGYVVSLKKSEIAQREVEFLGFNITKEGRGLTDTFKQKLLNITPPKDLKQLQSILGLLNFARNFIPNYSELVKPLYTIVANANGKFISWTEDNSNQLQHIISVLNQADNLEERNPETRLIIKVNSSPSAGYIRYYNEGSKRPIMYVNYIFSKAEAKFTQTEKLLTTMHKGLIKAMDLAMGQEILVYSPIVSMTKIQRTPLPERKALPVRWITWMTYLEDPRIQFHYDKSLPELQQIPNVTEDVIAKTKHPSEFAMVFYTDGSAIKHPDVNKSHSAGMGIAQVQFIPEYKIVHQWSIPLGDHTAQLAEIAAVEFACKKALKISGPVLIVTDSFYVAESANKELPYWKSNGFLNNKKKPLRHVSKWKSIAECLQLKPDIIIMHEKGHQQPMTTLHTEGNNLADKLATQGSYVVH

SEQ ID NO: 8106 - protein, 751 aa, synthetic construct
MDPLQLLQPLEAEIKGTKLKAHWNSGATITCVPEAFLEDERPIQTMLIKTIHGEKQQDVYYLTFKVQGRKVEAEVLASPYDYILLNPSDVPWLMKKPLQLTVLVPLHEYQERLLQQTALPKEQKELLQKLFLKYDALWQHWENQVGHRRIKPHNIATGTLAPRPQKQYPINPKAKPSIQIVIDDLLKQGVLIQQNSTMNTPVYPVPKPDGKWRMVLDYREVNKTIPLIAAQNQHSAGILSSIYRGKYKTTLDLTNGFWAHPITPESYWLTAFTWQGKQYCWTRLPQGFLNSPALFNADVVDLLKEIPNVQAYVDDIYISHDDPQEHLEQLEKIFSILLNAGYVVSLKKSEIAQREVEFLGFNITKEGRGLTDTFKQKLLNITPPKDLKQLQSILGLLNFARNFIPNYSELVKPLYTIVAPANGKFISWTEDNSNQLQHIISVLNQADNLEERNPETRLIIKVNSSPSAGYIRYYNEGSKRPIMYVNYIFSKAEAKFTQTEKLLTTMHKGLIKAMDLAMGQEILVYSPIVSMTKIQRTPLPERKALPVRWITWMTYLEDPRIQFHYDKSLPELQQIPNVTEDVIAKTKHPSEFAMVFYTDGSAIKHPDVNKSHSAGMGIAQVQFIPEYKIVHQWSIPLGDHTAQLAEIAAVEFACKKALKISGPVLIVTDSFYVAESANKELPYWKSNGFLNNKKKPLRHVSKWKSIAECLQLKPDIIIMHEKGHQQPMTTLHTEGNNLADKLATQGSYVVH

SEQ ID NO: 8107 - protein, 751 aa, synthetic construct
MDPLQLLQPLEAEIKGTKLKAHWNSGATITCVPEAFLEDERPIQTMLIKTIHGEKQQDVYYLTFKVQGRKVEAEVLASPYDYILLNPSDVPWLMKKPLQLTVLVPLHEYQERLLQQTALPKEQKELLQKLFLKYDALWQHWENQVGHRRIKPHNIATGTLAPRPQKQYPINPKAKPSIQIVIDDLLKQGVLIQQNSTMNTPVYPVPKPDGKWRMVLDYREVNKTIPLIAAQNQHSAGILSSIYRGKYKTTLDLTNGFWAHPITPESYWLTAFTWQGKQYCWTRLPQGFLNSPALFNADVVDLLKEIPNVQAYVDDIYISHDDPQEHLEQLEKIFSILLNAGYVVSLKKSEIAQREVEFLGFNITKEGRGLTDTFKQKLLNITPPKDLKQLQSILGKLNFARNFIPNYSELVKPLYTIVAPANGKFISWTEDNSNQLQHIISVLNQADNLEERNPETRLIIKVNSSPSAGYIRYYNEGSKRPIMYVNYIFSKAEAKFTQTEKLLTTMHKGLIKAMDLAMGQEILVYSPIVSMTKIQRTPLPERKALPVRWITWMTYLEDPRIQFHYDKSLPELQQIPNVTEDVIAKTKHPSEFAMVFYTDGSAIKHPDVNKSHSAGMGIAQVQFIPEYKIVHQWSIPLGDHTAQLAEIAAVEFACKKALKISGPVLIVTDSFYVAESANKELPYWKSNGFLNNKKKPLRHVSKWKSIAECLQLKPDIIIMHEKGHQQPMTTLHTEGNNLADKLATQGSYVVH

SEQ ID NO: 8108 - protein, 662 aa, synthetic construct
VPWLMKKPLQLTVLVPLHEYQERLLQQTALPKEQKELLQKLFLKYDALWQHWENQVGHRRIKPHNIATGTLAPRPQKQYPINPKAKPSIQIVIDDLLKQGVLIQQNSTMNTPVYPVPKPDGKWRMVLDYREVNKTIPLIAAQNQHSAGILSSIYRGKYKTTLDLTNGFWAHPITPESYWLTAFTWQGKQYCWTRLPQGFLNSPALFTADVVDLLKEIPNVQAYVDDIYISHDDPQEHLEQLEKIFSILLNAGYVVSLKKSEIAQREVEFLGFNITKEGRGLTDTFKQKLLNITPPKDLKQLQSILGLLNFARNFIPNYSELVKPLYTIVANANGKFISWTEDNSNQLQHIISVLNQADNLEERNPETRLIIKVNSSPSAGYIRYYNEGSKRPIMYVNYIFSKAEAKFTQTEKLLTTMHKGLIKAMDLAMGQEILVYSPIVSMTKIQRTPLPERKALPVRWITWMTYLEDPRIQFHYDKSLPELQQIPNVTEDVIAKTKHPSEFAMVFYTDGSAIKHPDVNKSHSAGMGIAQVQFIPEYKIVHQWSIPLGDHTAQLAEIAAVEFACKKALKISGPVLIVTDSFYVAESANKELPYWKSNGFLNNKKKPLRHVSKWKSIAECLQLKPDIIIMHEKGHQQPMTTLHTEGNNLADKLATQGSYVVH

SEQ ID NO: 8109 - protein, 662 aa, synthetic construct
VPWLMKKPLQLTVLVPLHEYQERLLQQTALPKEQKELLQKLFLKYDALWQHWENQVGHRRIKPHNIATGTLAPRPQKQYPINPKAKPSIQIVIDDLLKQGVLIQQNSTMNTPVYPVPKPDGKWRMVLDYREVNKTIPLIAAQNQHSAGILSSIYRGKYKTTLDLTNGFWAHPITPESYWLTAFTWQGKQYCWTRLPQGFLNSPALFNADVVDLLKEIPNVQAYVDDIYISHDDPQEHLEQLEKIFSILLNAGYVVSLKKSEIAQREVEFLGFNITKEGRGLTDTFKQKLLNITPPKDLKQLQSILGLLNFARNFIPNYSELVKPLYTIVAPANGKFISWTEDNSNQLQHIISVLNQADNLEERNPETRLIIKVNSSPSAGYIRYYNEGSKRPIMYVNYIFSKAEAKFTQTEKLLTTMHKGLIKAMDLAMGQEILVYSPIVSMTKIQRTPLPERKALPVRWITWMTYLEDPRIQFHYDKSLPELQQIPNVTEDVIAKTKHPSEFAMVFYTDGSAIKHPDVNKSHSAGMGIAQVQFIPEYKIVHQWSIPLGDHTAQLAEIAAVEFACKKALKISGPVLIVTDSFYVAESANKELPYWKSNGFLNNKKKPLRHVSKWKSIAECLQLKPDIIIMHEKGHQQPMTTLHTEGNNLADKLATQGSYVVH

SEQ ID NO: 8110 - protein, 662 aa, synthetic construct
VPWLMKKPLQLTVLVPLHEYQERLLQQTALPKEQKELLQKLFLKYDALWQHWENQVGHRRIKPHNIATGTLAPRPQKQYPINPKAKPSIQIVIDDLLKQGVLIQQNSTMNTPVYPVPKPDGKWRMVLDYREVNKTIPLIAAQNQHSAGILSSIYRGKYKTTLDLTNGFWAHPITPESYWLTAFTWQGKQYCWTRLPQGFLNSPALFNADVVDLLKEIPNVQAYVDDIYISHDDPQEHLEQLEKIFSILLNAGYVVSLKKSEIAQREVEFLGFNITKEGRGLTDTFKQKLLNITPPKDLKQLQSILGKLNFARNFIPNYSELVKPLYTIVAPANGKFISWTEDNSNQLQHIISVLNQADNLEERNPETRLIIKVNSSPSAGYIRYYNEGSKRPIMYVNYIFSKAEAKFTQTEKLLTTMHKGLIKAMDLAMGQEILVYSPIVSMTKIQRTPLPERKALPVRWITWMTYLEDPRIQFHYDKSLPELQQIPNVTEDVIAKTKHPSEFAMVFYTDGSAIKHPDVNKSHSAGMGIAQVQFIPEYKIVHQWSIPLGDHTAQLAEIAAVEFACKKALKISGPVLIVTDSFYVAESANKELPYWKSNGFLNNKKKPLRHVSKWKSIAECLQLKPDIIIMHEKGHQQPMTTLHTEGNNLADKLATQGSYVVH

SEQ ID NO: 8111 - protein, 751 aa, unidentified
MDPLQLLQPLEAEIKGTKLKAHWNSGATITCVPQAFLEEEVPIKNIWIKTIHGEKEQPVYYLTFKIQGRKVEAEVISSPYDYILVSPSDIPWLMKKPLQLTTLVPLQEYEERLLKQTMLTGSYKEKLQSLFLKYDALWQHWENQVGHRRIKPHHIATGTVNPRPQKQYPINPKAKASIQTVINDLLKQGVLIQQNSIMNTPVYPVPKPDGKWRMVLDYREVNKTIPLIAAQNQHSAGILSSIFRGKYKTTLDLSNGFWAHSITPESYWLTAFTWLGQQYCWTRLPQGFLNSPALFTADVVDLLKEVPNVQVYVDDIYISHDDPREHLEQLEKVFSLLLNAGYVVSLKKSEIAQHEVEFLGFNITKEGRGLTETFKQKLLNITPPRDLKQLQSILGLLNFARNFIPNFSELVKPLYNIIATANGKYITWTTDNSQQLQNIISMLNSAENLEERNPEVRLIMKVNTSPSAGYIRFYNEFAKRPIMYLNYVYTKAEVKFTNTEKLLTTIHKGLIKALDLGMGQEILVYSPIVSMTKIQKTPLPERKALPIRWITWMSYLEDPRIQFHYDKTLPELQQVPTVTDDIIAKIKHPSEFSMVFYTDGSAIKHPNVNKSHNAGMGIAQVQFKPEFTVINTWSIPLGDHTAQLAEVAAVEFACKKALKIDGPVLIVTDSFYVAESVNKELPYWQSNGFFNNKKKPLKHVSKWKSIADCIQLKPDIIIIHEKGHQPTASTFHTEGNNLADKLATQGSYVVN

SEQ ID NO: 8112 - protein, 751 aa, synthetic construct
MDPLQLLQPLEAEIKGTKLKAHWNSGATITCVPQAFLEEEVPIKNIWIKTIHGEKEQPVYYLTFKIQGRKVEAEVISSPYDYILVSPSDIPWLMKKPLQLTTLVPLQEYEERLLKQTMLTGSYKEKLQSLFLKYDALWQHWENQVGHRRIKPHHIATGTVNPRPQKQYPINPKAKASIQTVINDLLKQGVLIQQNSIMNTPVYPVPKPDGKWRMVLDYREVNKTIPLIAAQNQHSAGILSSIFRGKYKTTLDLSNGFWAHSITPESYWLTAFTWLGQQYCWTRLPQGFLNSPALFNADVVDLLKEVPNVQVYVDDIYISHDDPREHLEQLEKVFSLLLNAGYVVSLKKSEIAQHEVEFLGFNITKEGRGLTETFKQKLLNITPPRDLKQLQSILGLLNFARNFIPNFSELVKPLYNIIATAPGKYITWTTDNSQQLQNIISMLNSAENLEERNPEVRLIMKVNTSPSAGYIRFYNEFAKRPIMYLNYVYTKAEVKFTNTEKLLTTIHKGLIKALDLGMGQEILVYSPIVSMTKIQKTPLPERKALPIRWITWMSYLEDPRIQFHYDKTLPELQQVPTVTDDIIAKIKHPSEFSMVFYTDGSAIKHPNVNKSHNAGMGIAQVQFKPEFTVINTWSIPLGDHTAQLAEVAAVEFACKKALKIDGPVLIVTDSFYVAESVNKELPYWQSNGFFNNKKKPLKHVSKWKSIADCIQLKPDIIIIHEKGHQPTASTFHTEGNNLADKLATQGSYVVN

SEQ ID NO: 8113 - protein, 751 aa, synthetic construct
MDPLQLLQPLEAEIKGTKLKAHWNSGATITCVPQAFLEEEVPIKNIWIKTIHGEKEQPVYYLTFKIQGRKVEAEVISSPYDYILVSPSDIPWLMKKPLQLTTLVPLQEYEERLLKQTMLTGSYKEKLQSLFLKYDALWQHWENQVGHRRIKPHHIATGTVNPRPQKQYPINPKAKASIQTVINDLLKQGVLIQQNSIMNTPVYPVPKPDGKWRMVLDYREVNKTIPLIAAQNQHSAGILSSIFRGKYKTTLDLSNGFWAHSITPESYWLTAFTWLGQQYCWTRLPQGFLNSPALFNADVVDLLKEVPNVQVYVDDIYISHDDPREHLEQLEKVFSLLLNAGYVVSLKKSEIAQHEVEFLGFNITKEGRGLTETFKQKLLNITPPRDLKQLQSILGKLNFARNFIPNFSELVKPLYNIIATAPGKYITWTTDNSQQLQNIISMLNSAENLEERNPEVRLIMKVNTSPSAGYIRFYNEFAKRPIMYLNYVYTKAEVKFTNTEKLLTTIHKGLIKALDLGMGQEILVYSPIVSMTKIQKTPLPERKALPIRWITWMSYLEDPRIQFHYDKTLPELQQVPTVTDDIIAKIKHPSEFSMVFYTDGSAIKHPNVNKSHNAGMGIAQVQFKPEFTVINTWSIPLGDHTAQLAEVAAVEFACKKALKIDGPVLIVTDSFYVAESVNKELPYWQSNGFFNNKKKPLKHVSKWKSIADCIQLKPDIIIIHEKGHQPTASTFHTEGNNLADKLATQGSYVVN

SEQ ID NO: 8114 - protein, 662 aa, unidentified
IPWLMKKPLQLTTLVPLQEYEERLLKQTMLTGSYKEKLQSLFLKYDALWQHWENQVGHRRIKPHHIATGTVNPRPQKQYPINPKAKASIQTVINDLLKQGVLIQQNSIMNTPVYPVPKPDGKWRMVLDYREVNKTIPLIAAQNQHSAGILSSIFRGKYKTTLDLSNGFWAHSITPESYWLTAFTWLGQQYCWTRLPQGFLNSPALFTADVVDLLKEVPNVQVYVDDIYISHDDPREHLEQLEKVFSLLLNAGYVVSLKKSEIAQHEVEFLGFNITKEGRGLTETFKQKLLNITPPRDLKQLQSILGLLNFARNFIPNFSELVKPLYNIIATANGKYITWTTDNSQQLQNIISMLNSAENLEERNPEVRLIMKVNTSPSAGYIRFYNEFAKRPIMYLNYVYTKAEVKFTNTEKLLTTIHKGLIKALDLGMGQEILVYSPIVSMTKIQKTPLPERKALPIRWITWMSYLEDPRIQFHYDKTLPELQQVPTVTDDIIAKIKHPSEFSMVFYTDGSAIKHPNVNKSHNAGMGIAQVQFKPEFTVINTWSIPLGDHTAQLAEVAAVEFACKKALKIDGPVLIVTDSFYVAESVNKELPYWQSNGFFNNKKKPLKHVSKWKSIADCIQLKPDIIIIHEKGHQPTASTFHTEGNNLADKLATQGSYVVN

SEQ ID NO: 8115 - protein, 662 aa, synthetic construct
IPWLMKKPLQLTTLVPLQEYEERLLKQTMLTGSYKEKLQSLFLKYDALWQHWENQVGHRRIKPHHIATGTVNPRPQKQYPINPKAKASIQTVINDLLKQGVLIQQNSIMNTPVYPVPKPDGKWRMVLDYREVNKTIPLIAAQNQHSAGILSSIFRGKYKTTLDLSNGFWAHSITPESYWLTAFTWLGQQYCWTRLPQGFLNSPALFNADVVDLLKEVPNVQVYVDDIYISHDDPREHLEQLEKVFSLLLNAGYVVSLKKSEIAQHEVEFLGFNITKEGRGLTETFKQKLLNITPPRDLKQLQSILGLLNFARNFIPNFSELVKPLYNIIATAPGKYITWTTDNSQQLQNIISMLNSAENLEERNPEVRLIMKVNTSPSAGYIRFYNEFAKRPIMYLNYVYTKAEVKFTNTEKLLTTIHKGLIKALDLGMGQEILVYSPIVSMTKIQKTPLPERKALPIRWITWMSYLEDPRIQFHYDKTLPELQQVPTVTDDIIAKIKHPSEFSMVFYTDGSAIKHPNVNKSHNAGMGIAQVQFKPEFTVINTWSIPLGDHTAQLAEVAAVEFACKKALKIDGPVLIVTDSFYVAESVNKELPYWQSNGFFNNKKKPLKHVSKWKSIADCIQLKPDIIIIHEKGHQPTASTFHTEGNNLADKLATQGSYVVN

SEQ ID NO: 8116 - protein, 662 aa, synthetic construct
IPWLMKKPLQLTTLVPLQEYEERLLKQTMLTGSYKEKLQSLFLKYDALWQHWENQVGHRRIKPHHIATGTVNPRPQKQYPINPKAKASIQTVINDLLKQGVLIQQNSIMNTPVYPVPKPDGKWRMVLDYREVNKTIPLIAAQNQHSAGILSSIFRGKYKTTLDLSNGFWAHSITPESYWLTAFTWLGQQYCWTRLPQGFLNSPALFNADVVDLLKEVPNVQVYVDDIYISHDDPREHLEQLEKVFSLLLNAGYVVSLKKSEIAQHEVEFLGFNITKEGRGLTETFKQKLLNITPPRDLKQLQSILGKLNFARNFIPNFSELVKPLYNIIATAPGKYITWTTDNSQQLQNIISMLNSAENLEERNPEVRLIMKVNTSPSAGYIRFYNEFAKRPIMYLNYVYTKAEVKFTNTEKLLTTIHKGLIKALDLGMGQEILVYSPIVSMTKIQKTPLPERKALPIRWITWMSYLEDPRIQFHYDKTLPELQQVPTVTDDIIAKIKHPSEFSMVFYTDGSAIKHPNVNKSHNAGMGIAQVQFKPEFTVINTWSIPLGDHTAQLAEVAAVEFACKKALKIDGPVLIVTDSFYVAESVNKELPYWQSNGFFNNKKKPLKHVSKWKSIADCIQLKPDIIIIHEKGHQPTASTFHTEGNNLADKLATQGSYVVN

SEQ ID NO: 8117 - protein, 751 aa, synthetic construct
MNPLQLLQPLPAEVKGTKLLAHWNSGATITCIPESFLEDEQPIKQTLIKTIHGEKQQNVYYLTFKVKGRKVEAEVIASPYEYILLSPTDVPWLTQQPLQLTILVPLQEYQDRILNKTALPEEQKQQLKALFTKYDNLWQHWENQVGHRKIRPHNIATGDYPPRPQKQYPINPKAKPSIQIVIDDLLKQGVLTPQNSTMNTPVYPVPKPDGRWRMVLDYREVNKTIPLTAAQNQHSAGILATIVRQKYKTTLDLANGFWAHPITPDSYWLTAFTWQGKQYCWTRLPQGFLNSPALFTADAVDLLKEVPNVQVYVDDIYLSHDNPHEHIQQLEKVFQILLQAGYVVSLKKSEIGQRTVEFLGFNITKEGRGLTDTFKTKLLNVTPPKDLKQLQSILGLLNFARNFIPNFAELVQTLYNLIASSKGKYIEWTEDNTKQLNKVIEALNTASNLEERLPDQRLVIKVNTSPSAGYVRYYNESGKKPIMYLNYVFSKAELKFSMLEKLLTTMHKALIKAMDLAMGQEILVYSPIVSMTKIQKTPLPERKALPIRWITWMTYLEDPRIQFHYDKTLPELKHIPDVYTSSIPPLKHPSQYEGVFCTDGSAIKSPDPTKSNNAGMGIVHAIYNPEYKILNQWSIPLGHHTAQMAEIAAVEFACKKALKVPGPVLVITDSFYVAESANKELPYWKSNGFVNNKKEPLKHISKWKSIAECLSIKPDITIQHEKGHQPINTSIHTEGNALADKLATQGSYVVN

SEQ ID NO: 8118 - protein, 751 aa, synthetic construct
MNPLQLLQPLPAEVKGTKLLAHWNSGATITCIPESFLEDEQPIKQTLIKTIHGEKQQNVYYLTFKVKGRKVEAEVIASPYEYILLSPTDVPWLTQQPLQLTILVPLQEYQDRILNKTALPEEQKQQLKALFTKYDNLWQHWENQVGHRKIRPHNIATGDYPPRPQKQYPINPKAKPSIQIVIDDLLKQGVLTPQNSTMNTPVYPVPKPDGRWRMVLDYREVNKTIPLTAAQNQHSAGILATIVRQKYKTTLDLANGFWAHPITPDSYWLTAFTWQGKQYCWTRLPQGFLNSPALFNADAVDLLKEVPNVQVYVDDIYLSHDNPHEHIQQLEKVFQILLQAGYVVSLKKSEIGQRTVEFLGFNITKEGRGLTDTFKTKLLNVTPPKDLKQLQSILGLLNFARNFIPNFAELVQTLYNLIASSPGKYIEWTEDNTKQLNKVIEALNTASNLEERLPDQRLVIKVNTSPSAGYVRYYNESGKKPIMYLNYVFSKAELKFSMLEKLLTTMHKALIKAMDLAMGQEILVYSPIVSMTKIQKTPLPERKALPIRWITWMTYLEDPRIQFHYDKTLPELKHIPDVYTSSIPPLKHPSQYEGVFCTDGSAIKSPDPTKSNNAGMGIVHAIYNPEYKILNQWSIPLGHHTAQMAEIAAVEFACKKALKVPGPVLVITDSFYVAESANKELPYWKSNGFVNNKKEPLKHISKWKSIAECLSIKPDITIQHEKGHQPINTSIHTEGNALADKLATQGSYVVN

SEQ ID NO: 8119 - protein, 751 aa, synthetic construct
MNPLQLLQPLPAEVKGTKLLAHWNSGATITCIPESFLEDEQPIKQTLIKTIHGEKQQNVYYLTFKVKGRKVEAEVIASPYEYILLSPTDVPWLTQQPLQLTILVPLQEYQDRILNKTALPEEQKQQLKALFTKYDNLWQHWENQVGHRKIRPHNIATGDYPPRPQKQYPINPKAKPSIQIVIDDLLKQGVLTPQNSTMNTPVYPVPKPDGRWRMVLDYREVNKTIPLTAAQNQHSAGILATIVRQKYKTTLDLANGFWAHPITPDSYWLTAFTWQGKQYCWTRLPQGFLNSPALFNADAVDLLKEVPNVQVYVDDIYLSHDNPHEHIQQLEKVFQILLQAGYVVSLKKSEIGQRTVEFLGFNITKEGRGLTDTFKTKLLNVTPPKDLKQLQSILGKLNFARNFIPNFAELVQTLYNLIASSPGKYIEWTEDNTKQLNKVIEALNTASNLEERLPDQRLVIKVNTSPSAGYVRYYNESGKKPIMYLNYVFSKAELKFSMLEKLLTTMHKALIKAMDLAMGQEILVYSPIVSMTKIQKTPLPERKALPIRWITWMTYLEDPRIQFHYDKTLPELKHIPDVYTSSIPPLKHPSQYEGVFCTDGSAIKSPDPTKSNNAGMGIVHAIYNPEYKILNQWSIPLGHHTAQMAEIAAVEFACKKALKVPGPVLVITDSFYVAESANKELPYWKSNGFVNNKKEPLKHISKWKSIAECLSIKPDITIQHEKGHQPINTSIHTEGNALADKLATQGSYVVN

SEQ ID NO: 8120 - protein, 662 aa, synthetic construct
VPWLTQQPLQLTILVPLQEYQDRILNKTALPEEQKQQLKALFTKYDNLWQHWENQVGHRKIRPHNIATGDYPPRPQKQYPINPKAKPSIQIVIDDLLKQGVLTPQNSTMNTPVYPVPKPDGRWRMVLDYREVNKTIPLTAAQNQHSAGILATIVRQKYKTTLDLANGFWAHPITPDSYWLTAFTWQGKQYCWTRLPQGFLNSPALFTADAVDLLKEVPNVQVYVDDIYLSHDNPHEHIQQLEKVFQILLQAGYVVSLKKSEIGQRTVEFLGFNITKEGRGLTDTFKTKLLNVTPPKDLKQLQSILGLLNFARNFIPNFAELVQTLYNLIASSKGKYIEWTEDNTKQLNKVIEALNTASNLEERLPDQRLVIKVNTSPSAGYVRYYNESGKKPIMYLNYVFSKAELKFSMLEKLLTTMHKALIKAMDLAMGQEILVYSPIVSMTKIQKTPLPERKALPIRWITWMTYLEDPRIQFHYDKTLPELKHIPDVYTSSIPPLKHPSQYEGVFCTDGSAIKSPDPTKSNNAGMGIVHAIYNPEYKILNQWSIPLGHHTAQMAEIAAVEFACKKALKVPGPVLVITDSFYVAESANKELPYWKSNGFVNNKKEPLKHISKWKSIAECLSIKPDITIQHEKGHQPINTSIHTEGNALADKLATQGSYVVN

SEQ ID NO: 8121 - protein, 662 aa, synthetic construct
VPWLTQQPLQLTILVPLQEYQDRILNKTALPEEQKQQLKALFTKYDNLWQHWENQVGHRKIRPHNIATGDYPPRPQKQYPINPKAKPSIQIVIDDLLKQGVLTPQNSTMNTPVYPVPKPDGRWRMVLDYREVNKTIPLTAAQNQHSAGILATIVRQKYKTTLDLANGFWAHPITPDSYWLTAFTWQGKQYCWTRLPQGFLNSPALFNADAVDLLKEVPNVQVYVDDIYLSHDNPHEHIQQLEKVFQILLQAGYVVSLKKSEIGQRTVEFLGFNITKEGRGLTDTFKTKLLNVTPPKDLKQLQSILGLLNFARNFIPNFAELVQTLYNLIASSPGKYIEWTEDNTKQLNKVIEALNTASNLEERLPDQRLVIKVNTSPSAGYVRYYNESGKKPIMYLNYVFSKAELKFSMLEKLLTTMHKALIKAMDLAMGQEILVYSPIVSMTKIQKTPLPERKALPIRWITWMTYLEDPRIQFHYDKTLPELKHIPDVYTSSIPPLKHPSQYEGVFCTDGSAIKSPDPTKSNNAGMGIVHAIYNPEYKILNQWSIPLGHHTAQMAEIAAVEFACKKALKVPGPVLVITDSFYVAESANKELPYWKSNGFVNNKKEPLKHISKWKSIAECLSIKPDITIQHEKGHQPINTSIHTEGNALADKLATQGSYVVN

SEQ ID NO: 8122 - protein, 662 aa, synthetic construct
VPWLTQQPLQLTILVPLQEYQDRILNKTALPEEQKQQLKALFTKYDNLWQHWENQVGHRKIRPHNIATGDYPPRPQKQYPINPKAKPSIQIVIDDLLKQGVLTPQNSTMNTPVYPVPKPDGRWRMVLDYREVNKTIPLTAAQNQHSAGILATIVRQKYKTTLDLANGFWAHPITPDSYWLTAFTWQGKQYCWTRLPQGFLNSPALFNADAVDLLKEVPNVQVYVDDIYLSHDNPHEHIQQLEKVFQILLQAGYVVSLKKSEIGQRTVEFLGFNITKEGRGLTDTFKTKLLNVTPPKDLKQLQSILGKLNFARNFIPNFAELVQTLYNLIASSPGKYIEWTEDNTKQLNKVIEALNTASNLEERLPDQRLVIKVNTSPSAGYVRYYNESGKKPIMYLNYVFSKAELKFSMLEKLLTTMHKALIKAMDLAMGQEILVYSPIVSMTKIQKTPLPERKALPIRWITWMTYLEDPRIQFHYDKTLPELKHIPDVYTSSIPPLKHPSQYEGVFCTDGSAIKSPDPTKSNNAGMGIVHAIYNPEYKILNQWSIPLGHHTAQMAEIAAVEFACKKALKVPGPVLVITDSFYVAESANKELPYWKSNGFVNNKKEPLKHISKWKSIAECLSIKPDITIQHEKGHQPINTSIHTEGNALADKLATQGSYVVN

SEQ ID NO: 8123 - protein, 592 aa, Squirrel monkey retrovirus
PRSRAIDIPVPHADKISWKITDPVWVDQWPLTYEKTLAAIALVQEQLAAGHIEPTNSPWNTPIFIIKKKSGSWRLLQDLRAVNKVMVPMGALQPGLPSPVAIPLNYHKIVIDLKDCFFTIPLHPEDRPYFAFSVPQINFQSPMPRYQWKVLPQGMANSPTLCQKFVAAAIAPVRSQWPEAYILHYMDDILLACDSAEAAKACYAHIISCLTSYGLKIAPDKVQVSEPFSYLGFELHHQQVFTPRVCLKTDHLKTLNDFQKLLGDIQWLRPYLKLPTSALVPLNNILKGDPNPLSVRALTPEAKQSLALINKAIQNQSVQQISYNLPLVLLLLPTPHTPTAVFWQPNGTDPTKNGSPLLWLHLPASPSKVLLTYPSLLAMLIIKGRYTGRQLFGRDPHSIIIPYTQDQLTWLLQTSDEWAIALSSFTGDIDNHYPSDPVIQFAKLHQFIFPKITKCAPIPQATLVFTDGSSNGIAAYVIDNQPISIKSPYLSAQLVELYAILQVFTVLAHQPFNLYTDSAYIAQSVPLLETVPFIKSSTNATPLFSKLQQLILNRQHPFFIGHLRAHLNLPGPLAEGNALADAATQIFPIISD

SEQ ID NO: 8124 - protein, 592 aa, synthetic construct
PRSRAIDIPVPHADKISWKITDPVWVDQWPLTYEKTLAAIALVQEQLAAGHIEPTNSPWNTPIFIIKKKSGSWRLLQDLRAVNKVMVPMGALQPGLPSPVAIPLNYHKIVIDLKDCFFTIPLHPEDRPYFAFSVPQINFQSPMPRYQWKVLPQGMANSPTLCQKFVAAAIAPVRSQWPEAYILHYMDDILLACDSAEAAKACYAHIISCLTSYGLKIAPDKVQVSEPFSYLGFELHHQQVFTPRVCLKTDHLKTLNDFQKLLGDIQWLRPYLKLPTSALVPLNNILKPDPNPLSVRALTPEAKQSLALINKAIQNQSVQQISYNLPLVLLLLPTPHTPTAVFWQPNGTDPTKNGSPLLWLHLPASPSKVLLTYPSLLAMLIIKGRYTGRQLFGRDPHSIIIPYTQDQLTWLLQTSDEWAIALSSFTGDIDNHYPSDPVIQFAKLHQFIFPKITKCAPIPQATLVFTDGSSNGIAAYVIDNQPISIKSPYLSAQLVELYAILQVFTVLAHQPFNLYTDSAYIAQSVPLLETVPFIKSSTNATPLFSKLQQLILNRQHPFFIGHLRAHLNLPGPLAEGNALADAATQIFPIISD

SEQ ID NO: 8125 - protein, 592 aa, synthetic construct
PRSRAIDIPVPHADKISWKITDPVWVDQWPLTYEKTLAAIALVQEQLAAGHIEPTNSPWNTPIFIIKKKSGSWRLLQDLRAVNKVMVPMGALQPGLPSPVAPPLNYHKIVIDLKDCFFTIPLHPEDRPYFAFSVPQINFQSPMPRYQWKVLPQGMANSPTLCQKFVAAAIAPVRSQWPEAYILHYMDDILLACDSAEAAKACYAHIISCLTSYGLKIAPDKVQVSEPFSYLGFELHHQQVFTPRVCLKTDHLKTLNDFQKLLGDIQWLRPYLKLPTSALVPLNNILKPDPNPLSVRALTPEAKQSLALINKAIQNQSVQQISYNLPLVLLLLPTPHTPTAVFWQPNGTDPTKNGSPLLWLHLPASPSKVLLTYPSLLAMLIIKGRYTGRQLFGRDPHSIIIPYTQDQLTWLLQTSDEWAIALSSFTGDIDNHYPSDPVIQFAKLHQFIFPKITKCAPIPQATLVFTDGSSNGIAAYVIDNQPISIKSPYLSAQLVELYAILQVFTVLAHQPFNLYTDSAYIAQSVPLLETVPFIKSSTNATPLFSKLQQLILNRQHPFFIGHLRAHLNLPGPLAEGNALADAATQIFPIISD

SEQ ID NO: 8126 - protein, 585 aa, unidentified
LATAVDILAPQRYADPITWKSDEPVWVDQWPLTQEKLAAAQQLVQEQLQAGHIIESNSPWNTPIFVIKKKSGKWRLLQDLRAVNATMVLMGALQPGLPSPVAIPQGYFKIVIDLKDCFFTIPLQPVDQKRFAFSLPSTNFKQPMKRYQWKVLPQGMANSPTLCQKYVAAAIEPVRKSWAQMYIIHYMDDILIAGKLGEQVLQCFAQLKQALTTTGLQIAPEKVQLQDPYTYLGFQINGPKITNQKAVIRRDKLQTLNDFQKLLGDINWLRPYLHLTTGDLKPLFDILKGDSNPNSPRSLSEAALASLQKVETAIAEQFVTQIDYTQPLTFLIFNTTLTPTGLFWQNNPVMWVHLPASPKKVLLPYYDAIADLIILGRDNSKKYFGLEPSTIIQPYSKSQIHWLMQNTETWPIACASYAGNIDNHYPPNKLIQFCKLHAVVFPRIISKTPLDNALLVFTDGSSTGIAAYTFEKTTVRFKTSHTSAQLVELQALIAVLSAFPHRALNVYTDSAYLAHSIPLLETVSHIKHISDTAKFFLQCQQLIYNRSIPFYLGHIRAHSGLPGPLSQGNHITDLATKVVATTLTT

SEQ ID NO: 8127 - protein, 585 aa, synthetic construct
LATAVDILAPQRYADPITWKSDEPVWVDQWPLTQEKLAAAQQLVQEQLQAGHIIESNSPWNTPIFVIKKKSGKWRLLQDLRAVNATMVLMGALQPGLPSPVAPPQGYFKIVIDLKDCFFTIPLQPVDQKRFAFSLPSTNFKQPMKRYQWKVLPQGMANSPTLCQKYVAAAIEPVRKSWAQMYIIHYMDDILIAGKLGEQVLQCFAQLKQALTTTGLQIAPEKVQLQDPYTYLGFQINGPKITNQKAVIRRDKLQTLNDFQKLLGDINWLRPYLHLTTGDLKPLFDILKGDSNPNSPRSLSEAALASLQKVETAIAEQFVTQIDYTQPLTFLIFNTTLTPTGLFWQNNPVMWVHLPASPKKVLLPYYDAIADLIILGRDNSKKYFGLEPSTIIQPYSKSQIHWLMQNTETWPIACASYAGNIDNHYPPNKLIQFCKLHAVVFPRIISKTPLDNALLVFTDGSSTGIAAYTFEKTTVRFKTSHTSAQLVELQALIAVLSAFPHRALNVYTDSAYLAHSIPLLETVSHIKHISDTAKFFLQCQQLIYNRSIPFYLGHIRAHSGLPGPLSQGNHITDLATKVVATTLTT

SEQ ID NO: 8128 - protein, 650 aa, Walleye dermal sarcoma virus
SCQTKNTLNIDEYLLQFPDQLWASLPTDIGRMLVPPITIKIKDNASLPSIRQYPLPKDKTEGLRPLISSLENQGILIKCHSPCNTPIFPIKKAGRDEYRMIHDLRAINNIVAPLTAVVASPTTVLSNLAPSLHWFTVIDLSNAFFSVPIHKDSQYLFAFTFEGHQYTWTVLPQGFIHSPTLFSQALYQSLHKIKFKISSEICIYMDDVLIASKDRDTNLKDTAVMLQHLASEGHKVSKKKLQLCQQEVVYLGQLLTPEGRKILPDRKVTVSQFQQPTTIRQIRAFLGLVGYCRHWIPEFSIHSKFLEKQLKKDTAEPFQLDDQQVEAFNKLKHAITTAPVLVVPDPAKPFQLYTSHSEHASIAVLTQKHAGRTRPIAFLSSKFDAIESGLPPCLKACASIHRSLTQADSFILGAPLIIYTTHAICTLLQRDRSQLVTASRFSKWEADLLRPELTFVACSAVSPAHLYMQSCENNIPPHDCVLLTHTISRPRPDLSDLPIPDPDMTLFSDGSYTTGRGGAAVVMHRPVTDDFIIIHQQPGGASAQTAELLALAAACHLATDKTVNIYTDSRYAYGVVHDFGHLWMHRGFVTSAGTPIKNHKEIEYLLKQIMKPKQVSVIKIEAHTKGVSMEVRGNAAADEAAKNAVFLVQR

SEQ ID NO: 8129 - protein, 650 aa, synthetic construct
SCQTKNTLNIDEYLLQFPDQLWASLPTDIGRMLVPPITIKIKDNASLPSIRQYPLPKDKTEGLRPLISSLENQGILIKCHSPCNTPIFPIKKAGRDEYRMIHDLRAINNIVAPLTAVVASPTTVLSNLAPSLHWFTVIDLSNAFFSVPIHKDSQYLFAFTFEGHQYTWTVLPQGFIHSPTLFNQALYQSLHKIKFKISSEICIYMDDVLIASKDRDTNLKDTAVMLQHLASEGHKVSKKKLQLCQQEVVYLGQLLTPEGRKILPDRKVTVSQFQQPTTIRQIRAFLGLVGYCRHWIPEFSIHSKFLEKQLKPDTAEPFQLDDQQVEAFNKLKHAITTAPVLVVPDPAKPFQLYTSHSEHASIAVLTQKHAGRTRPIAFLSSKFDAIESGLPPCLKACASIHRSLTQADSFILGAPLIIYTTHAICTLLQRDRSQLVTASRFSKWEADLLRPELTFVACSAVSPAHLYMQSCENNIPPHDCVLLTHTISRPRPDLSDLPIPDPDMTLFSDGSYTTGRGGAAVVMHRPVTDDFIIIHQQPGGASAQTAELLALAAACHLATDKTVNIYTDSRYAYGVVHDFGHLWMHRGFVTSAGTPIKNHKEIEYLLKQIMKPKQVSVIKIEAHTKGVSMEVRGNAAADEAAKNAVFLVQR

SEQ ID NO: 8130 - protein, 650 aa, synthetic construct
SCQTKNTLNIDEYLLQFPDQLWASLPTDIGRMLVPPITIKIKDNASLPSIRQYPLPKDKTEGLRPLISSLENQGILIKCHSPCNTPIFPIKKAGRDEYRMIHDLRAINNIVAPLTAVVASPTTVLSNLAPSLHWFTVIDLSNAFFSVPIHKDSQYLFAFTFEGHQYTWTVLPQGFIHSPTLFNQALYQSLHKIKFKISSEICIYMDDVLIASKDRDTNLKDTAVMLQHLASEGHKVSKKKLQLCQQEVVYLGQLLTPEGRKILPDRKVTVSQFQQPTTIRQIRAFLGKVGYCRHFIPEFSIHSKFLEKQLKPDTAEPFQLDDQQVEAFNKLKHAITTAPVLVVPDPAKPFQLYTSHSEHASIAVLTQKHAGRTRPIAFLSSKFDAIESGLPPCLKACASIHRSLTQADSFILGAPLIIYTTHAICTLLQRDRSQLVTASRFSKWEADLLRPELTFVACSAVSPAHLYMQSCENNIPPHDCVLLTHTISRPRPDLSDLPIPDPDMTLFSDGSYTTGRGGAAVVMHRPVTDDFIIIHQQPGGASAQTAELLALAAACHLATDKTVNIYTDSRYAYGVVHDFGHLWMHRGFVTSAGTPIKNHKEIEYLLKQIMKPKQVSVIKIEAHTKGVSMEVRGNAAADEAAKNAVFLVQR

SEQ ID NO: 8131 - protein, 669 aa, Woolly monkey sarcoma virus
VLNLEEEYRLHEKPVPSSIDPSWLQLFPTVWAERAGMGLANQVPPVVVELRSGASPVAVRQYPMSKEAREGIRPHIQRFLDLGVLVPCQSPWNTPLLPVKKPGTNDYRPVQDLREINKRVQDIHPTVPNPYNLLSSLPPSHTWYSVLDLKDAFFCLKLHPNSQPLFAFEWRDPEKGNTGQLTWTRLPQGFKNSPTLFDEALHRDLAPFRALNPQVVLLQYVDDLLVAAPTYRDCKEGTQKLLQELSKLGYRVSAKKAQLCQKEVTYLGYLLKEGKRWLTPARKATVMKIPPPTTPRQVREFLGTAGFCRLWIPGFASLAAPLYPLTKESIPFIWTEEHQKAFDRIKEALLSAPALALPDLTKPFTLYVDERAGVARGVLTQTLGPWRRPVAYLSKKLDPVASGWPTCLKAVAAVALLLKDADKLTLGQNVTVIASHSLESIVRQPPDRWMTNARMTHYQSLLLNERVSFAPPAVLNPATLLPVESEATPVHRCSEILAEETGTRRDLKDQPLPGVPAWYTDGSSFIAEGKRRAGAAIVDGKRTVWASSLPEGTSAQKAELVALTQALRLAEGKDINIYTDSRYAFATAHIHGAIYKQRGLLTSAGKDIKNKEEILALLEAIHLPKRVAIIHCPGHQKGNDPVATGNRRADEAAKQAALSTRVLAETTKP

SEQ ID NO: 8132 - protein, 669 aa, synthetic construct
VLNLEEEYRLHEKPVPSSIDPSWLQLFPTVWAERAGMGLANQVPPVVVELRSGASPVAVRQYPMSKEAREGIRPHIQRFLDLGVLVPCQSPWNTPLLPVKKPGTNDYRPVQDLREINKRVQDIHPTVPNPYNLLSSLPPSHTWYSVLDLKDAFFCLKLHPNSQPLFAFEWRDPEKGNTGQLTWTRLPQGFKNSPTLFNEALHRDLAPFRALNPQVVLLQYVDDLLVAAPTYRDCKEGTQKLLQELSKLGYRVSAKKAQLCQKEVTYLGYLLKEGKRWLTPARKATVMKIPPPTTPRQVREFLGTAGFCRLWIPGFASLAAPLYPLTKPSIPFIWTEEHQKAFDRIKEALLSAPALALPDLTKPFTLYVDERAGVARGVLTQTLGPWRRPVAYLSKKLDPVASGWPTCLKAVAAVALLLKDADKLTLGQNVTVIASHSLESIVRQPPDRWMTNARMTHYQSLLLNERVSFAPPAVLNPATLLPVESEATPVHRCSEILAEETGTRRDLKDQPLPGVPAWYTDGSSFIAEGKRRAGAAIVDGKRTVWASSLPEGTSAQKAELVALTQALRLAEGKDINIYTDSRYAFATAHIHGAIYKQRGWLTSAGKDIKNKEEILALLEAIHLPKRVAIIHCPGHQKGNDPVATGNRRADEAAKQAALSTRVLAETTKP

SEQ ID NO: 8133 - protein, 669 aa, synthetic construct
VLNLEEEYRLHEKPVPSSIDPSWLQLFPTVWAERAGMGLANQVPPVVVELRSGASPVAVRQYPMSKEAREGIRPHIQRFLDLGVLVPCQSPWNTPLLPVKKPGTNDYRPVQDLREINKRVQDIHPTVPNPYNLLSSLPPSHTWYSVLDLKDAFFCLKLHPNSQPLFAFEWRDPEKGNTGQLTWTRLPQGFKNSPTLFNEALHRDLAPFRALNPQVVLLQYVDDLLVAAPTYRDCKEGTQKLLQELSKLGYRVSAKKAQLCQKEVTYLGYLLKEGKRWLTPARKATVMKIPPPTTPRQVREFLGKAGFCRLFIPGFASLAAPLYPLTKPSIPFIWTEEHQKAFDRIKEALLSAPALALPDLTKPFTLYVDERAGVARGVLTQTLGPWRRPVAYLSKKLDPVASGWPTCLKAVAAVALLLKDADKLTLGQNVTVIASHSLESIVRQPPDRWMTNARMTHYQSLLLNERVSFAPPAVLNPATLLPVESEATPVHRCSEILAEETGTRRDLKDQPLPGVPAWYTDGSSFIAEGKRRAGAAIVDGKRTVWASSLPEGTSAQKAELVALTQALRLAEGKDINIYTDSRYAFATAHIHGAIYKQRGWLTSAGKDIKNKEEILALLEAIHLPKRVAIIHCPGHQKGNDPVATGNRRADEAAKQAALSTRVLAETTKP

SEQ ID NO: 8134 - protein, 671 aa, unidentified
TLNIEDEYRLHETSKEPDVPLGSTWLSDFPQAWAETGGMGLAVRQAPLIIPLKATSTPVSIKQYPMSQEARLGIKPHIQRLLDQGILVPCQSPWNTPLLPVKKPGTNDYRPVQDLREVNKRVEDIHPTVPNPYNLLSGLPPSHQWYTVLDLKDAFFCLRLHPTSQPLFAFEWRDPEMGISGQLTWTRLPQGFKNSPTLFDEALHRDLADFRIQHPDLILLQYVDDLLLAATSEQDCQRGTRALLQTLGNLGYRASAKKAQICQKQVKYLGYLLKEGQRWLTEARKETVMGQPTPKTPRQLREFLGTAGFCRLWIPGFAEMAAPLYPLTKTGTLFNWGPDQQKAYQEIKQALLTAPALGLPDLTKPFELFVDEKQGYAKGVLTQKLGPWRRPVAYLSKKLDPVAAGWPPCLRMVAAIAVLTKDAGKLTMGQPLVILAPHAVEALVKQPPDRWLSNARMTHYQAMLLDTDRVQFGPVVALNPATLLPLPEKEAPHDCLEILAETHGTRPDLTDQPIPDADYTWYTDGSSFLQEGQRRAGAAVTTETEVIWARALPAGTSAQRAELIALTQALKMAEGKKLNVYTDSRYAFATAHVHGEIYRRRGLLTSEGREIKNKNEILALLKALFLPKRLSIIHCPGHQKGNSAEARGNRMADQAAREAAMKAVLETSTLL

SEQ ID NO: 8135 - protein, 671 aa, synthetic construct
TLNIEDEYRLHETSKEPDVPLGSTWLSDFPQAWAETGGMGLAVRQAPLIIPLKATSTPVSIKQYPMSQEARLGIKPHIQRLLDQGILVPCQSPWNTPLLPVKKPGTNDYRPVQDLREVNKRVEDIHPTVPNPYNLLSGLPPSHQWYTVLDLKDAFFCLRLHPTSQPLFAFEWRDPEMGISGQLTWTRLPQGFKNSPTLFNEALHRDLADFRIQHPDLILLQYVDDLLLAATSEQDCQRGTRALLQTLGNLGYRASAKKAQICQKQVKYLGYLLKEGQRWLTEARKETVMGQPTPKTPRQLREFLGTAGFCRLWIPGFAEMAAPLYPLTKPGTLFNWGPDQQKAYQEIKQALLTAPALGLPDLTKPFELFVDEKQGYAKGVLTQKLGPWRRPVAYLSKKLDPVAAGWPPCLRMVAAIAVLTKDAGKLTMGQPLVILAPHAVEALVKQPPDRWLSNARMTHYQAMLLDTDRVQFGPVVALNPATLLPLPEKEAPHDCLEILAETHGTRPDLTDQPIPDADYTWYTDGSSFLQEGQRRAGAAVTTETEVIWARALPAGTSAQRAELIALTQALKMAEGKKLNVYTDSRYAFATAHVHGEIYRRRGWLTSEGREIKNKNEILALLKALFLPKRLSIIHCPGHQKGNSAEARGNRMADQAAREAAMKAVLETSTLL

SEQ ID NO: 8136 - protein, 671 aa, synthetic construct
TLNIEDEYRLHETSKEPDVPLGSTWLSDFPQAWAETGGMGLAVRQAPLIIPLKATSTPVSIKQYPMSQEARLGIKPHIQRLLDQGILVPCQSPWNTPLLPVKKPGTNDYRPVQDLREVNKRVEDIHPTVPNPYNLLSGLPPSHQWYTVLDLKDAFFCLRLHPTSQPLFAFEWRDPEMGISGQLTWTRLPQGFKNSPTLFNEALHRDLADFRIQHPDLILLQYVDDLLLAATSEQDCQRGTRALLQTLGNLGYRASAKKAQICQKQVKYLGYLLKEGQRWLTEARKETVMGQPTPKTPRQLREFLGKAGFCRLFIPGFAEMAAPLYPLTKPGTLFNWGPDQQKAYQEIKQALLTAPALGLPDLTKPFELFVDEKQGYAKGVLTQKLGPWRRPVAYLSKKLDPVAAGWPPCLRMVAAIAVLTKDAGKLTMGQPLVILAPHAVEALVKQPPDRWLSNARMTHYQAMLLDTDRVQFGPVVALNPATLLPLPEKEAPHDCLEILAETHGTRPDLTDQPIPDADYTWYTDGSSFLQEGQRRAGAAVTTETEVIWARALPAGTSAQRAELIALTQALKMAEGKKLNVYTDSRYAFATAHVHGEIYRRRGWLTSEGREIKNKNEILALLKALFLPKRLSIIHCPGHQKGNSAEARGNRMADQAAREAAMKAVLETSTLL

SEQ ID NO: 8137 - protein, 46 aa, synthetic construct; identical to SEQ ID NO: 5217

SEQ ID NO: 8138 - protein, 46 aa, synthetic construct; identical to SEQ ID NO: 5217

SEQ ID NO: 8139 - protein, 46 aa, synthetic construct; identical to SEQ ID NO: 5217

SEQ ID NO: 8140 - protein, 46 aa, synthetic construct; identical to SEQ ID NO: 5217

SEQ ID NO: 8141 - protein, 20 aa, synthetic construct
GGGGSGGGGSGGGGSGGGGS

SEQ ID NO: 8142 - protein, 30 aa, synthetic construct; identical to SEQ ID NO: 5112

SEQ ID NO: 8143 - protein, 30 aa, synthetic construct; identical to SEQ ID NO: 5112

SEQ ID NO: 8144 - protein, 18 aa, synthetic construct
GSSGSSGSSGSSGSSGSS

SEQ ID NO: 8145 - protein, 20 aa, synthetic construct
EAAAKEAAAKEAAAKEAAAK

SEQ ID NO: 8146 - protein, 30 aa, synthetic construct; identical to SEQ ID NO: 5130

SEQ ID NO: 8147 - protein, 11 aa, synthetic construct
PAPAPAPAPAP

SEQ ID NO: 8148 - protein, 13 aa, synthetic construct
PAPAPAPAPAPAP

SEQ ID NO: 8149 - protein, 13 aa, synthetic construct
PAPAPAPAPAPAP

SEQ ID NO: 8150 - protein, 13 aa, synthetic construct
PAPAPAPAPAPAP

SEQ ID NO: 8151 - protein, 13 aa, synthetic construct
PAPAPAPAPAPAP

SEQ ID NO: 8152 - protein, 13 aa, synthetic construct
PAPAPAPAPAPAP

SEQ ID NO: 8153 - protein, 8 aa, synthetic construct
EAAAKGGG

SEQ ID NO: 8154 - protein, 8 aa, synthetic construct
EAAAKGGG

SEQ ID NO: 8155 - protein, 6 aa, synthetic construct
PAPGGG

SEQ ID NO: 8156 - protein, 9 aa, synthetic construct
GGGGSSGGS

SEQ ID NO: 8157 - protein, 11 aa, synthetic construct
GGGGGSEAAAK

SEQ ID NO: 8158 - protein, 11 aa, synthetic construct
GGGEAAAKGGS

SEQ ID NO: 8159 - protein, 11 aa, synthetic construct
GGGEAAAKGGS

SEQ ID NO: 8160 - protein, 11 aa, synthetic construct
GGGEAAAKGGS

SEQ ID NO: 8161 - protein, 9 aa, synthetic construct
GGSGGGPAP

SEQ ID NO: 8162 - protein, 9 aa, synthetic construct
PAPGGSGGG

SEQ ID NO: 8163 - protein, 9 aa, synthetic construct
PAPGGSGGG

SEQ ID NO: 8164 - protein, 11 aa, synthetic construct
GGSEAAAKPAP

SEQ ID NO: 8165 - protein, 11 aa, synthetic construct
GGSPAPEAAAK

SEQ ID NO: 8166 - protein, 11 aa, synthetic construct
GGSPAPEAAAK

SEQ ID NO: 8167 - protein, 11 aa, synthetic construct
EAAAKGGSPAP

SEQ ID NO: 8168 - protein, 11 aa, synthetic construct
EAAAKGGSPAP

SEQ ID NO: 8169 - protein, 11 aa, synthetic construct
EAAAKPAPGGS

SEQ ID NO: 8170 - protein, 11 aa, synthetic construct
EAAAKPAPGGS

SEQ ID NO: 8171 - protein, 11 aa, synthetic construct
GGGGSSEAAAK

SEQ ID NO: 8172 - protein, 11 aa, synthetic construct
GGGGSSEAAAK

SEQ ID NO: 8173 - protein, 11 aa, synthetic construct
GSSGGGEAAAK

SEQ ID NO: 8174 - protein, 11 aa, synthetic construct
GSSGGGEAAAK

SEQ ID NO: 8175 - protein, 11 aa, synthetic construct
GSSEAAAKGGG

SEQ ID NO: 8176 - protein, 9 aa, synthetic construct
GSSGGGPAP

SEQ ID NO: 8177 - protein, 9 aa, synthetic construct
GSSPAPGGG

SEQ ID NO: 8178 - protein, 9 aa, synthetic construct
PAPGGGGSS

SEQ ID NO: 8179 - protein, 11 aa, synthetic construct
GGGEAAAKPAP

SEQ ID NO: 8180 - protein, 11 aa, synthetic construct
GGGEAAAKPAP

SEQ ID NO: 8181 - protein, 11 aa, synthetic construct
GGGPAPEAAAK

SEQ ID NO: 8182 - protein, 11 aa, synthetic construct
GSSEAAAKPAP

SEQ ID NO: 8183 - protein, 11 aa, synthetic construct
GSSEAAAKPAP

SEQ ID NO: 8184 - protein, 11 aa, synthetic construct
GSSPAPEAAAK

SEQ ID NO: 8185 - protein, 11 aa, synthetic construct
GSSPAPEAAAK

SEQ ID NO: 8186 - protein, 11 aa, synthetic construct
GSSPAPEAAAK

SEQ ID NO: 8187 - protein, 11 aa, synthetic construct
PAPGSSEAAAK

SEQ ID NO: 8188 - protein, 11 aa, synthetic construct
PAPGSSEAAAK

SEQ ID NO: 8189 - protein, 46 aa, synthetic construct; identical to SEQ ID NO: 5217

SEQ ID NO: 8190 - protein, 46 aa, synthetic construct; identical to SEQ ID NO: 5217

SEQ ID NO: 8191 - protein, 46 aa, synthetic construct; identical to SEQ ID NO: 5217

SEQ ID NO: 8192 - protein, 46 aa, synthetic construct; identical to SEQ ID NO: 5217

SEQ ID NO: 8193 - protein, 46 aa, synthetic construct; identical to SEQ ID NO: 5217

SEQ ID NO: 8194 - protein, 46 aa, synthetic construct; identical to SEQ ID NO: 5217

SEQ ID NO: 8195 - protein, 46 aa, synthetic construct; identical to SEQ ID NO: 5217

SEQ ID NO: 8196 - protein, 16 aa, synthetic construct
SGSETPGTSESATPES

SEQ ID NO: 8197 - protein, 1367 aa, synthetic construct
DKKYSIGLDIGTNSVGWAVITDEYKVPSKKFKVLGNTDRHSIKKNLIGALLFDSGETAEATRLKRTARRRYTRRKNRICYLQEIFSNEMAKVDDSFFHRLEESFLVEEDKKHERHPIFGNIVDEVAYHEKYPTIYHLRKKLVDSTDKADLRLIYLALAHMIKFRGHFLIEGDLNPDNSDVDKLFIQLVQTYNQLFEENPINASGVDAKAILSARLSKSRRLENLIAQLPGEKKNGLFGNLIALSLGLTPNFKSNFDLAEDAKLQLSKDTYDDDLDNLLAQIGDQYADLFLAAKNLSDAILLSDILRVNTEITKAPLSASMIKRYDEHHQDLTLLKALVRQQLPEKYKEIFFDQSKNGYAGYIDGGASQEEFYKFIKPILEKMDGTEELLVKLNREDLLRKQRTFDNGSIPHQIHLGELHAILRRQEDFYPFLKDNREKIEKILTFRIPYYVGPLARGNSRFAWMTRKSEETITPWNFEEVVDKGASAQSFIERMTNFDKNLPNEKVLPKHSLLYEYFTVYNELTKVKYVTEGMRKPAFLSGEQKKAIVDLLFKTNRKVTVKQLKEDYFKKIECFDSVEISGVEDRFNASLGTYHDLLKIIKDKDFLDNEENEDILEDIVLTLTLFEDREMIEERLKTYAHLFDDKVMKQLKRRRYTGWGRLSRKLINGIRDKQSGKTILDFLKSDGFANRNFMQLIHDDSLTFKEDIQKAQVSGQGDSLHEHIANLAGSPAIKKGILQTVKVVDELVKVMGRHKPENIVIEMARENQTTQKGQKNSRERMKRIEEGIKELGSQILKEHPVENTQLQNEKLYLYYLQNGRDMYVDQELDINRLSDYDVDHIVPQSFLKDDSIDNKVLTRSDKARGKSDNVPSEEVVKKMKNYWRQLLNAKLITQRKFDNLTKAERGGLSELDKAGFIKRQLVETRQITKHVAQILDSRMNTKYDENDKLIREVKVITLKSKLVSDFRKDFQFYKVREINNYHHAHDAYLNAVVGTALIKKYPKLESEFVYGDYKVYDVRKMIAKSEQEIGKATAKYFFYSNIMNFFKTEITLANGEIRKRPLIETNGETGEIVWDKGRDFATVRKVLSMPQVNIVKKTEVQTGGFSKESILPKRNSDKLIARKKDWDPKKYGGFDSPTVAYSVLVVAKVEKGKSKKLKSVKELLGITIMERSSFEKNPIDFLEAKGYKEVKKDLIIKLPKYSLFELENGRKRMLASAGELQKGNELALPSKYVNFLYLASHYEKLKGSPEDNEQKQLFVEQHKHYLDEIIEQISEFSKRVILADANLDKVLSAYNKHRDKPIREQAENIIHLFTLTNLGAPAAFKYFDTTIDRKRYTSTKEVLDATLIHQSITGLYETRIDLSQLGGD

SEQ ID NO: 8198 - protein, 10 aa, synthetic construct
KRTADGSEFE

SEQ ID NO: 8199 - protein, 19 aa, synthetic construct
KRTADGSEFESPKKKAKVE

SEQ ID NO: 8200 - protein, 29 aa, synthetic construct
KRTADGSEFEKRTADGSEFESPKKKAKVE

SEQ ID NO: 8201 - RNA, 14 nt, synthetic construct
  source 1..14: mol_type = other RNA
ttgcgttcgcgcaa

SEQ ID NO: 8202 - RNA, 14 nt, synthetic construct
  source 1..14: mol_type = other RNA
acgctgcaaagcgt

SEQ ID NO: 8203 - RNA, 24 nt, synthetic construct
  source 1..24: mol_type = other RNA
gctcccgctagcaatagcgggagt

SEQ ID NO: 8204 - RNA, 24 nt, synthetic construct
  source 1..24: mol_type = other RNA
agacgcgaacttcggttcgcgtct

SEQ ID NO: 8205 - RNA, 34 nt, synthetic construct
  source 1..34: mol_type = other RNA
cgggacctaacgtgattcgtcacgttaggtcccg

SEQ ID NO: 8206 - RNA, 34 nt, synthetic construct
  source 1..34: mol_type = other RNA
gcaacgacgacccgagcaatcgggtcgtcgttgt

SEQ ID NO: 8207 - RNA, 62 nt, synthetic construct
  source 1..62: mol_type = other RNA
ttgcctagtgttgaggtgttcgcacctcaacttcatagatccgcaaggatctatctaggcaa

SEQ ID NO: 8208 - RNA, 62 nt, synthetic construct
  source 1..62: mol_type = other RNA
atcgctcgaggtgaagagttcgcttttcatcaaatcgaagccgcaaggtttcgacgagcgat

SEQ ID NO: 8209 - RNA, 74 nt, synthetic construct
  source 1..74: mol_type = other RNA
ttgccatgtgtatgtgggttttttttttcccacatactctgatgatccttttttttttggatcattcatggcaa

SEQ ID NO: 8210 - RNA, 22 nt, synthetic construct
  source 1..22: mol_type = other RNA
ggggagtgggagggacagaggg

SEQ ID NO: 8211 - RNA, 44 nt, synthetic construct
  source 1..44: mol_type = other RNA
gggaactgtgatggggtgggcagggctgggagaactttgtacag

SEQ ID NO: 8212 - RNA, 50 nt, synthetic construct
  source 1..50: mol_type = other RNA
aggaaaataacataagacacgcaactcaaacatactcaaacaacgccacc

SEQ ID NO: 8213 - RNA, 50 nt, synthetic construct
  source 1..50: mol_type = other RNA
aggataataacataagatactaactaataaatactaaactcaacgccacc

SEQ ID NO: 8214 - RNA, 50 nt, synthetic construct
  source 1..50: mol_type = other RNA
aggataatatacttacatacttactaattaatactaaactcaacgccacc

SEQ ID NO: 8215 - RNA, 50 nt, synthetic construct
  source 1..50: mol_type = other RNA
aggatcaacacaacatactaaaaaactctatacaatacaaattagccacc

SEQ ID NO: 8216 - RNA, 50 nt, synthetic construct
  source 1..50: mol_type = other RNA
aggatcacacaacaactcacactactcatacatcgacacacatagccacc

SEQ ID NO: 8217 - RNA, 50 nt, synthetic construct
  source 1..50: mol_type = other RNA
aggaacaacacaacaaactaaaaaacacaatacaaaacaaataagccacc

SEQ ID NO: 8218 - RNA, 60 nt, synthetic construct
  source 1..60: mol_type = other RNA
aggatcacacaacaactcacactactcatacatcgacacacataccccggcgccgccacc

SEQ ID NO: 8219 - RNA, 50 nt, synthetic construct
  source 1..50: mol_type = other RNA
aggacaaacattacacaactaaataaacaactatcaattaaccggccacc

SEQ ID NO: 8220 - RNA, 50 nt, synthetic construct
  source 1..50: mol_type = other RNA
aggacaaacacaacacaactaaataaacaactaacaatacaaccgccacc

SEQ ID NO: 8221 - RNA, 50 nt, synthetic construct
  source 1..50: mol_type = other RNA
aggacaatcacaatcatactaatatatcaactatcaattaatcggccacc

SEQ ID NO: 8222 - RNA, 50 nt, synthetic construct
  source 1..50: mol_type = other RNA
aggacatataaaacaacactatcactaacaactatcaaaatcaggccacc

SEQ ID NO: 8223 - RNA, 50 nt, synthetic construct
  source 1..50: mol_type = other RNA
aggacatatataacaacactatcactatcaactatcataatctcgccacc

SEQ ID NO: 8224 - RNA, 50 nt, synthetic construct
  source 1..50: mol_type = other RNA
aggacacacaaaacaacacacaaatcaacaactaacaaaatcacgccacc

SEQ ID NO: 8225 - RNA, 60 nt, synthetic construct
  source 1..60: mol_type = other RNA
aggacacacaaaacaacacacaaatcaacaactaacaaaatcacccccggcgccgccacc

SEQ ID NO: 8226 - RNA, 50 nt, synthetic construct
  source 1..50: mol_type = other RNA
aggaacataaacatcaaaactaaacaacaaatcaacacaacaacgccacc

SEQ ID NO: 8227 - RNA, 50 nt, synthetic construct
  source 1..50: mol_type = other RNA
aggaacatatacatcaatactaaacaactaatcaacacaactacgccacc

SEQ ID NO: 8228 - RNA, 50 nt, synthetic construct
  source 1..50: mol_type = other RNA
aggatcataatactacaatactatacaactatcaatactatcacgccacc

SEQ ID NO: 8229 - RNA, 50 nt, synthetic construct
  source 1..50: mol_type = other RNA
aggaaacacaacaacacaactaacaacacaacacaactaaacaagccacc

SEQ ID NO: 8230 - RNA, 50 nt, synthetic construct
  source 1..50: mol_type = other RNA
aggaaatataataaatcataaataatcataataaataatcaatagccacc

SEQ ID NO: 8231 - RNA, 70 nt, synthetic construct
  source 1..70: mol_type = other RNA
aggtctaatatatcaaaataacatctaaaaacaacatatctaaattctaatatacacgtcgttcgccacc

SEQ ID NO: 8232 - RNA, 70 nt, synthetic construct
  source 1..70: mol_type = other RNA
aggactaataaatcaaaataacaactaaaaacaacataactaaatactaataaacacgtcgatcgccacc

SEQ ID NO: 8233 - RNA, 70 nt, synthetic construct
  source 1..70: mol_type = other RNA
aggactaataaatcaaaataacaactaaaaacaacataacaaaatacaaataaacacaacacaagccacc

SEQ ID NO: 8234 - RNA, 80 nt, synthetic construct
  source 1..80: mol_type = other RNA
aggactaataaatcaaaataacaactaaaaacaacataacaaaatacaaataaacacaacacaaccccggcgccgccacc

SEQ ID NO: 8235 - RNA, 70 nt, synthetic construct
  source 1..70: mol_type = other RNA
aggtcaacaatttcttatcattaaaacgctttatcctttattacccttttatttctcttaatctgccacc

SEQ ID NO: 8236 - RNA, 70 nt, synthetic construct
  source 1..70: mol_type = other RNA
aggacaacaataactctaataaacaaacgaattctattatatcaccacattatatctctaatctgccacc

SEQ ID NO: 8237 - RNA, 70 nt, synthetic construct
  source 1..70: mol_type = other RNA
aggacaacaataacatcacataacaaatacaaatctaacaacacacaaatataactctaaatcagccacc

SEQ ID NO: 8238 - RNA, 70 nt, synthetic construct
  source 1..70: mol_type = other RNA
aggaacaattacaaataacaattacaaaatcagcaaacacataaactcaagaccagattataaagccacc

SEQ ID NO: 8239 - RNA, 70 nt, synthetic construct
  source 1..70: mol_type = other RNA
aggaacaattacatataacaattacttaatcagcaaacatcattactctcgaccacatattaaagccacc

SEQ ID NO: 8240 - RNA, 70 nt, synthetic construct
  source 1..70: mol_type = other RNA
aggaacaatcacacataacaattacacaatcaccaaacacatcaacctacacaccaattataaagccacc

SEQ ID NO: 8241 - RNA, 70 nt, synthetic construct
  source 1..70: mol_type = other RNA
aggatcatcaaatcaacataaataaagaaaaaacaaagtcttacccgaaatcataattaaacacgccacc

SEQ ID NO: 8242 - RNA, 70 nt, synthetic construct
  source 1..70: mol_type = other RNA
aggatcatcaacaacataataatcaaataacaacaattcacatctcactttcataattaaacacgccacc

SEQ ID NO: 8243 - RNA, 70 nt, synthetic construct
  source 1..70: mol_type = other RNA
aggatcatcaaacacataataatcaaataacaacactactcacaaacacttacaaatcaaacacgccacc

SEQ ID NO: 8244 - RNA, 80 nt, synthetic construct
  source 1..80: mol_type = other RNA
aggatcatcaaacacataataatcaaataacaacactactcacaaacacttacaaatcaaacacccccggcgccgccacc

SEQ ID NO: 8245 - RNA, 70 nt, synthetic construct
  source 1..70: mol_type = other RNA
aggaccattacactatactatttactataattttcatatactaactatttcaatcttatcccgcgccacc

SEQ ID NO: 8246 - RNA, 70 nt, synthetic construct
  source 1..70: mol_type = other RNA
aggaccataacaacttacactatactataataatcaaatacttacaaactcaatcttatcacacgccacc

SEQ ID NO: 8247 - RNA, 70 nt, synthetic construct
  source 1..70: mol_type = other RNA
aggacaacaacaaacaacactaaactacaataatcaaatactaaaacacacaatcaaatcacacgccacc

SEQ ID NO: 8248 - RNA, 110 nt, synthetic construct
  source 1..110: mol_type = other RNA
gctggagcctcggtggcctagcttcttgccccttgggcctccccccagcccctcctccccttcctgcacccgtacccccgtggtctttgaataaagtctgagtgggcggc

SEQ ID NO: 8249 - RNA, 155 nt, synthetic construct
  source 1..155: mol_type = other RNA
tccataaagtaggaaacactacagctggagcctcggtggccatgcttcttgccccttgggcctccccccagcccctcctccccttcctgcacccgtaccccccgcattattactcacggtacgagtggtctttgaataaagtctgagtgggcggc

SEQ ID NO: 8250 - RNA, 295 nt, synthetic construct
  source 1..295: mol_type = other RNA
ctcgagctggtactgcatgcacgcaatgctagctgcccctttcccgtcctgggtaccccgagtctcccccgacctcgggtcccaggtatgctcccacctccacctgccccactcaccacctctgctagttccagacacctcccaagcacgcagcaatgcagctcaaaacgcttagcctagccacacccccacgggaaacagcagtgattaacctttagcaataaacgaaagtttaactaagctatactaaccccagggttggtcaatttcgtgccagccacaccctggagctagc

SEQ ID NO: 8251 - RNA, 122 nt, synthetic construct
  source 1..122: mol_type = other RNA
ttgtgtatgcgttaataaaaagaaggaactcgtaaaaactcaatgtatttctgaggaagcgtggtgcataatgccacgcagcgtctgcataacttttattatttcttttattaatcaacaaa

SEQ ID NO: 8252 - RNA, 34 nt, synthetic construct
  source 1..34: mol_type = other RNA
ttgtgtatgcgttaataaaaagaaggaactcgta

SEQ ID NO: 8253 - RNA, 93 nt, synthetic construct
  source 1..93: mol_type = other RNA
gctgccttctgcggggcttgccttctggccatgcccttcttctctcccttgcacctgtacctcttggtctttgaataaagcctgagtaggaag

SEQ ID NO: 8254 - RNA, 196 nt, synthetic construct
  source 1..196: mol_type = other RNA
gctagccatcacatttaaaagcatctcagcctaccatgagaataagagaaagaaaatgaagatcaatagcttattcatctctttttctttttcgttggtgtaaagccaacaccctgtctaaaaaacataaatttctttaatcattttgcctcttttctctgtgcttcaattaataaaaaatggaaagaacctcgag

SEQ ID NO: 8255 - DNA, 81 bp, synthetic construct
  source 1..81: mol_type = other DNA
agcggctcggagacgccgggcaccagcgagtcggcgacgccggagtcggtcagcgggtggaggctcttcaagaagatcagc

SEQ ID NO: 8256 - RNA, 105 nt, synthetic construct
  source 1..105: mol_type = other RNA
gctggagcctcggtggccatgcttcttgccccttgggcctccccccagcccctcctccccttcctgcacccgtacccccgtggtctttgaataaagtctgactag

SEQ ID NO: 8257 - protein, 2122 aa, synthetic construct
MPAAKRVKLDGGDKKYSIGLDIGTNSVGWAVITDEYKVPSKKFKVLGNTDRHSIKKNLIGALLFDSGETAEATRLKRTARRRYTRRKNRICYLQEIFSNEMAKVDDSFFHRLEESFLVEEDKKHERHPIFGNIVDEVAYHEKYPTIYHLRKKLVDSTDKADLRLIYLALAHMIKFRGHFLIEGDLNPDNSDVDKLFIQLVQTYNQLFEENPINASGVDAKAILSARLSKSRRLENLIAQLPGEKKNGLFGNLIALSLGLTPNFKSNFDLAEDAKLQLSKDTYDDDLDNLLAQIGDQYADLFLAAKNLSDAILLSDILRVNTEITKAPLSASMIKRYDEHHQDLTLLKALVRQQLPEKYKEIFFDQSKNGYAGYIDGGASQEEFYKFIKPILEKMDGTEELLVKLNREDLLRKQRTFDNGSIPHQIHLGELHAILRRQEDFYPFLKDNREKIEKILTFRIPYYVGPLARGNSRFAWMTRKSEETITPWNFEEVVDKGASAQSFIERMTNFDKNLPNEKVLPKHSLLYEYFTVYNELTKVKYVTEGMRKPAFLSGEQKKAIVDLLFKTNRKVTVKQLKEDYFKKIECFDSVEISGVEDRFNASLGTYHDLLKIIKDKDFLDNEENEDILEDIVLTLTLFEDREMIEERLKTYAHLFDDKVMKQLKRRRYTGWGRLSRKLINGIRDKQSGKTILDFLKSDGFANRNFMQLIHDDSLTFKEDIQKAQVSGQGDSLHEHIANLAGSPAIKKGILQTVKVVDELVKVMGRHKPENIVIEMARENQTTQKGQKNSRERMKRIEEGIKELGSQILKEHPVENTQLQNEKLYLYYLQNGRDMYVDQELDINRLSDYDVDHIVPQSFLKDDSIDNKVLTRSDKARGKSDNVPSEEVVKKMKNYWRQLLNAKLITQRKFDNLTKAERGGLSELDKAGFIKRQLVETRQITKHVAQILDSRMNTKYDENDKLIREVKVITLKSKLVSDFRKDFQFYKVREINNYHHAHDAYLNAVVGTALIKKYPKLESEFVYGDYKVYDVRKMIAKSEQEIGKATAKYFFYSNIMNFFKTEITLANGEIRKRPLIETNGETGEIVWDKGRDFATVRKVLSMPQVNIVKKTEVQTGGFSKESILPKRNSDKLIARKKDWDPKKYGGFDSPTVAYSVLVVAKVEKGKSKKLKSVKELLGITIMERSSFEKNPIDFLEAKGYKEVKKDLIIKLPKYSLFELENGRKRMLASAGELQKGNELALPSKYVNFLYLASHYEKLKGSPEDNEQKQLFVEQHKHYLDEIIEQISEFSKRVILADANLDKVLSAYNKHRDKPIREQAENIIHLFTLTNLGAPAAFKYFDTTIDRKRYTSTKEVLDATLIHQSITGLYETRIDLSQLGGDSGGSSGGSSGSETPGTSESATPESSGGSSGGSSTLNIEDEYRLHETSKEPDVSLGSTWLSDFPQAWAETGGMGLAVRQAPLIIPLKATSTPVSIKQYPMSQEARLGIKPHIQRLLDQGILVPCQSPWNTPLLPVKKPGTNDYRPVQDLREVNKRVEDIHPTVPNPYNLLSGLPPSHQWYTVLDLKDAFFCLRLHPTSQPLFAFEWRDPEMGISGQLTWTRLPQGFKNSPTLFNEALHRDLADFRIQHPDLILLQYVDDLLLAATSELDCQQGTRALLQTLGNLGYRASAKKAQICQKQVKYLGYLLKEGQRWLTEARKETVMGQPTPKTPRQLREFLGKAGFCRLFIPGFAEMAAPLYPLTKPGTLFNWGPDQQKAYQEIKQALLTAPALGLPDLTKPFELFVDEKQGYAKGVLTQKLGPWRRPVAYLSKKLDPVAAGWPPCLRMVAAIAVLTKDAGKLTMGQPLVILAPHAVEALVKQPPDRWLSNARMTHYQALLLDTDRVQFGPVVALNPATLLPLPEEGLQHNCLDILAEAHGTRPDLTDQPLPDADHTWYTDGSSLLQEGQRKAGAAVTTETEVIWAKALPAGTSAQRAELIALTQALKMAEGKKLNVYTDSRYAFATAHIHGEIYRRRGWLTSEGKEIKNKDEILALLKALFLPKRLSIIHCPGHQKGHSAEARGNRMADQAARKAAITETPDTSTLLIENSSPSGGSKRTADGSEFEKRTADGSEFESPKKKAKVE

SEQ ID NO: 8258 - RNA, 122 nt, synthetic construct
  source 1..122: mol_type = other RNA
gccgaagcactgcacgccgtgttttagagctagaaatagcaagttaaaataaggctagtccgttatcaacttgaaaaagtggcaccgagtcggtgcaccctgacgtacggcgtgcagtgctt

SEQ ID NO: 8259 - RNA, 47 nt, synthetic construct
  source 1..47: mol_type = other RNA
aggaaataagagagaaaagaagagtaagaagaaatataagagccacc

SEQ ID NO: 8260 - RNA, 48 nt, synthetic construct
  source 1..48: mol_type = other RNA
agggaaataagagagaaaagaagagtaagaagaaatataagagccacc

SEQ ID NO: 8261 - RNA, 58 nt, synthetic construct
  source 1..58: mol_type = other RNA
agggaaataagagagaaaagaagagtaagaagaaatataagaccccggcgccgccacc

SEQ ID NO: 8262 - RNA, 55 nt, synthetic construct
  source 1..55: mol_type = other RNA
agagaataaactagtattcttctggtccccacagactcagagagaacccgccacc

SEQ ID NO: 8263 - RNA, 71 nt, synthetic construct
  source 1..71: mol_type = other RNA
aggcaaaaatcaaaatcaatcatcatcacaacatcaacaatcaatcatcaacacatcatcaagacaccacc

SEQ ID NO: 8264 - RNA, 114 nt, synthetic construct
  source 1..114: mol_type = other RNA
gctggagcctcggtggcctagcttcttgccccttgggcctccccccagcccctcctccccttcctgcacccgtacccccgtggtctttgaataaagtctgagtgggcggcctag

SEQ ID NO: 8265 - RNA, 159 nt, synthetic construct
  source 1..159: mol_type = other RNA
tccataaagtaggaaacactacagctggagcctcggtggccatgcttcttgccccttgggcctccccccagcccctcctccccttcctgcacccgtaccccccgcattattactcacggtacgagtggtctttgaataaagtctgagtgggcggcctag

SEQ ID NO: 8266 - RNA, 299 nt, synthetic construct
  source 1..299: mol_type = other RNA
ctcgagctggtactgcatgcacgcaatgctagctgcccctttcccgtcctgggtaccccgagtctcccccgacctcgggtcccaggtatgctcccacctccacctgccccactcaccacctctgctagttccagacacctcccaagcacgcagcaatgcagctcaaaacgcttagcctagccacacccccacgggaaacagcagtgattaacctttagcaataaacgaaagtttaactaagctatactaaccccagggttggtcaatttcgtgccagccacaccctggagctagcctag

SEQ ID NO: 8267 - RNA, 126 nt, synthetic construct
  source 1..126: mol_type = other RNA
ttgtgtatgcgttaataaaaagaaggaactcgtaaaaactcaatgtatttctgaggaagcgtggtgcataatgccacgcagcgtctgcataacttttattatttcttttattaatcaacaaactag

SEQ ID NO: 8268 - RNA, 38 nt, synthetic construct
  source 1..38: mol_type = other RNA
ttgtgtatgcgttaataaaaagaaggaactcgtactag

SEQ ID NO: 8269 - RNA, 97 nt, synthetic construct
  source 1..97: mol_type = other RNA
gctgccttctgcggggcttgccttctggccatgcccttcttctctcccttgcacctgtacctcttggtctttgaataaagcctgagtaggaagctag

SEQ ID NO: 8270 - DNA, 33 bp, synthetic construct
  source 1..33: mol_type = other DNA
cccgccgccaagcgggtgaagctggacggcggc

SEQ ID NO: 8271 - protein, 11 aa, synthetic construct
PAAKRVKLDGG

SEQ ID NO: 8272 - DNA, 87 bp, synthetic construct
  source 1..87: mol_type = other DNA
aagcggaccgccgacggcagcgagttcgagaagcggaccgccgacggcagcgagttcgagagccccaagaagaaggccaaggtggag

SEQ ID NO: 8273 - protein, 29 aa, synthetic construct
KRTADGSEFEKRTADGSEFESPKKKAKVE

SEQ ID NO: 8274 - DNA, 138 bp, synthetic construct
  source 1..138: mol_type = other DNA
gccgaggccgccgccaaggaggccgccgccaaggaggccgccgccaaggaggccgccgccaaggccctggaggccgaggccgccgccaaggaggccgccgccaaggaggccgccgccaaggaggccgccgccaaggcc

SEQ ID NO: 8275 - protein, 46 aa, synthetic construct; identical to SEQ ID NO: 5217

SEQ ID NO: 8276 - DNA, 592 bp, synthetic construct
  source 1..592: mol_type = other DNA
aatcaacctctggattacaaaatttgtgaaagattgactgatattcttaactatgttgctccttttacgctgtgtggatatgctgctttaatgcctctgtatcatgctattgcttcccgtacggctttcgttttctcctccttgtataaatcctggttgctgtctctttatgaggagttgtggcccgttgtccgtcaacgtggcgtggtgtgctctgtgtttgctgacgcaacccccactggctggggcattgccaccacctgtcaactcctttctgggactttcgctttccccctcccgatcgccacggcagaactcatcgccgcctgccttgcccgctgctggacaggggctaggttgctgggcactgataattccgtggtgttgtcggggaagctgacgtcctttccatggctgctcgcctgtgttgccaactggatcctgcgcgggacgtccttctgctacgtcccttcggctctcaatccagcggacctcccttcccgaggccttctgccggttctgcggcctctcccgcgtcttcgctttcggcctccgacgagtcggatctccctttgggccgcctccccgcctg

SEQ ID NO: 8277 - protein, 9 aa, synthetic construct
PAAKRVKLD

SEQ ID NO: 8278 - protein, 19 aa, synthetic construct
KRTADGSEFESPKKKRKVE

SEQ ID NO: 8279 - RNA, 129 nt, synthetic construct
  source 1..129: mol_type = other RNA
aaaaaaaaaaaaaaaccaaaaaaaaaaaaaaaaaaaaaaaaacccaaaaaaaaaaaaaaaaaaaaaaaaaaaaaaaaaaccccaaaaaaaaaaaaaaaaaaaaaaaaaaaaaaaaaaaaaaaaaaaaaa

SEQ ID NO: 8280 - RNA, 129 nt, synthetic construct
  source 1..129: mol_type = other RNA
aaaaaaaaaaaaaaattaaaaaaaaaaaaaaaaaaaaaaaaatttaaaaaaaaaaaaaaaaaaaaaaaaaaaaaaaaaatttttaaaaaaaaaaaaaaaaaaaaaaaaaaaaaaaaaaaaaaaaaaaaa

SEQ ID NO: 8281 - RNA, 101 nt, synthetic construct
  source 1..101: mol_type = other RNA
gctggagcctcggtggccatgcttcttgccccttgggcctccccccagcccctcctccccttcctgcacccgtacccccgtggtctttgaataaagtctga

SEQ ID NO: 8282 - RNA, 129 nt, synthetic construct
  source 1..129: mol_type = other RNA
aaaaaaaaaaaaaaaaaaaaaaaaaaaaaaggaaaaaaaaaaaaaaaaaaaaaaaaaaaaaagggaaaaaaaaaaaaaaaaaaaaaaaaaaaaaaggggaaaaaaaaaaaaaaaaaaaaaaaaaaaaaa

SEQ ID NO: 8283 - RNA, 129 nt, synthetic construct
  source 1..129: mol_type = other RNA
aaaaaaaaaaaaaaaaaaaaaaaaaaaaaaccaaaaaaaaaaaaaaaaaaaaaaaaaaaaaacccaaaaaaaaaaaaaaaaaaaaaaaaaaaaaaccccaaaaaaaaaaaaaaaaaaaaaaaaaaaaaa

SEQ ID NO: 8284 - RNA, 129 nt, synthetic construct
  source 1..129: mol_type = other RNA
aaaaaaaaaaaaaaaaaaaaaaaaaaaaaattaaaaaaaaaaaaaaaaaaaaaaaaaaaaaatttaaaaaaaaaaaaaaaaaaaaaaaaaaaaaattttaaaaaaaaaaaaaaaaaaaaaaaaaaaaaa

SEQ ID NO: 8285 - RNA, 139 nt, synthetic construct
  source 1..139: mol_type = other RNA
aaaaaaaaaaaaaaaaaaaaaaaaaaaaaaggggaaaaaaaaaaaaaaaaaaaaaaaaaaaaaaggggggaaaaaaaaaaaaaaaaaaaaaaaaaaaaaaaggggggggaaaaaaaaaaaaaaaaaaaaaaaaaaaaaa

SEQ ID NO: 8286 - RNA, 138 nt, synthetic construct
  source 1..138: mol_type = other RNA
aaaaaaaaaaaaaaaaaaaaaaaaaaaaaaccccaaaaaaaaaaaaaaaaaaaaaaaaaaaaaaccccccaaaaaaaaaaaaaaaaaaaaaaaaaaaaaaccccccccaaaaaaaaaaaaaaaaaaaaaaaaaaaaaa

SEQ ID NO: 8287 - RNA, 138 nt, synthetic construct
  source 1..138: mol_type = other RNA
aaaaaaaaaaaaaaaaaaaaaaaaaaaaaattttaaaaaaaaaaaaaaaaaaaaaaaaaaaaaattttttaaaaaaaaaaaaaaaaaaaaaaaaaaaaaattttttttaaaaaaaaaaaaaaaaaaaaaaaaaaaaaa

SEQ ID NO: 8288 - RNA, 138 nt, synthetic construct
  source 1..138: mol_type = other RNA
aaaaaaaaaaaaaaaaaaaaaaaaaaaaaagcccaaaaaaaaaaaaaaaaaaaaaaaaaaaaaacccgccaaaaaaaaaaaaaaaaaaaaaaaaaaaaaacgccgccgaaaaaaaaaaaaaaaaaaaaaaaaaaaaaa

SEQ ID NO: 8289 - RNA, 138 nt, synthetic construct
  source 1..138: mol_type = other RNA
aaaaaaaaaaaaaaaaaaaaaaaaaaaaaggtgaaaaaaaaaaaaaaaaaaaaaaaaaaaaaaattgtgtaaaaaaaaaaaaaaaaaaaaaaaaaaaaaagttgtgttaaaaaaaaaaaaaaaaaaaaaaaaaaaaaa

SEQ ID NO: 8290 - RNA, 137 nt, synthetic construct
  source 1..137: mol_type = other RNA
aaaaaaaaaaaaaaaaaaaaaaaaaaaaattccaaaaaaaaaaaaaaaaaaaaaaaaaaaaaacttctcaaaaaaaaaaaaaaaaaaaaaaaaaaaaaatctctcttaaaaaaaaaaaaaaaaaaaaaaaaaaaaaa

SEQ ID NO: 8291 - RNA, 138 nt, synthetic construct
  source 1..138: mol_type = other RNA
aaaaaaaaaaaaaaaaaaaaaaaaaaaaaagttcaaaaaaaaaaaaaaaaaaaaaaaaaaaaaatcttccaaaaaaaaaaaaaaaaaaaaaaaaaaaaaaccgtcgcgaaaaaaaaaaaaaaaaaaaaaaaaaaaaaa

SEQ ID NO: 8292 - RNA, 126 nt, synthetic construct
  source 1..126: mol_type = other RNA
aaaaaaaaaaaaaaaggaaaaaaaaaaaaaaaaaaaaaaaaaggaaaaaaaaaaaaaaaaaaaaaaaaaaaaaaaaaaaggaaaaaaaaaaaaaaaaaaaaaaaaaaaaaaaaaaaaaaaaaaaaa

SEQ ID NO: 8293 - RNA, 126 nt, synthetic construct
  source 1..126: mol_type = other RNA
aaaaaaaaaaaaaaaccaaaaaaaaaaaaaaaaaaaaaaaaaccaaaaaaaaaaaaaaaaaaaaaaaaaaaaaaaaaacccaaaaaaaaaaaaaaaaaaaaaaaaaaaaaaaaaaaaaaaaaaaaa

SEQ ID NO: 8294 - RNA, 126 nt, synthetic construct
  source 1..126: mol_type = other RNA
aaaaaaaaaaaaaaattaaaaaaaaaaaaaaaaaaaaaaaaattaaaaaaaaaaaaaaaaaaaaaaaaaaaaaaaaaaattaaaaaaaaaaaaaaaaaaaaaaaaaaaaaaaaaaaaaaaaaaaaa

SEQ ID NO: 8295 - RNA, 132 nt, synthetic construct
  source 1..132: mol_type = other RNA
aaaaaaaaaaaaaaaggggaaaaaaaaaaaaaaaaaaaaaaaaaggggaaaaaaaaaaaaaaaaaaaaaaaaaaaaaaaaaaaggggaaaaaaaaaaaaaaaaaaaaaaaaaaaaaaaaaaaaaaaaaaaaa

SEQ ID NO: 8296 - RNA, 131 nt, synthetic construct
  source 1..131: mol_type = other RNA
aaaaaaaaaaaaaaaccccaaaaaaaaaaaaaaaaaaaaaaaaaccccaaaaaaaaaaaaaaaaaaaaaaaaaaaaaaaaacccccaaaaaaaaaaaaaaaaaaaaaaaaaaaaaaaaaaaaaaaaaaaaa

SEQ ID NO: 8297 - RNA, 132 nt, synthetic construct
  source 1..132: mol_type = other RNA
aaaaaaaaaaaaaaattttaaaaaaaaaaaaaaaaaaaaaaaaattttaaaaaaaaaaaaaaaaaaaaaaaaaaaaaaaaaaattttaaaaaaaaaaaaaaaaaaaaaaaaaaaaaaaaaaaaaaaaaaaaa

SEQ ID NO: 8298 - RNA, 144 nt, synthetic construct
  source 1..144: mol_type = other RNA
aaaaaaaaaaaaaaaggggggggaaaaaaaaaaaaaaaaaaaaaaaaaggggggggaaaaaaaaaaaaaaaaaaaaaaaaaaaaaaaaaaaggggggggaaaaaaaaaaaaaaaaaaaaaaaaaaaaaaaaaaaaaaaaaaaaa

SEQ ID NO: 8299 - RNA, 144 nt, synthetic construct
  source 1..144: mol_type = other RNA
aaaaaaaaaaaaaaaccccccccaaaaaaaaaaaaaaaaaaaaaaaaaccccccccaaaaaaaaaaaaaaaaaaaaaaaaaaaaaaaaaacccccccccaaaaaaaaaaaaaaaaaaaaaaaaaaaaaaaaaaaaaaaaaaaaa

SEQ ID NO: 8300 - RNA, 144 nt, synthetic construct
  source 1..144: mol_type = other RNA
aaaaaaaaaaaaaaattttttttaaaaaaaaaaaaaaaaaaaaaaaaattttttttaaaaaaaaaaaaaaaaaaaaaaaaaaaaaaaaaaattttttttaaaaaaaaaaaaaaaaaaaaaaaaaaaaaaaaaaaaaaaaaaaaa

SEQ ID NO: 8301 - RNA, 144 nt, synthetic construct
  source 1..144: mol_type = other RNA
aaaaaaaaaaaaaaaccgccccgaaaaaaaaaaaaaaaaaaaaaaaaagcccgcccaaaaaaaaaaaaaaaaaaaaaaaaaaaaaaaaaaaccccgccgaaaaaaaaaaaaaaaaaaaaaaaaaaaaaaaaaaaaaaaaaaaaa

SEQ ID NO: 8302 - RNA, 144 nt, synthetic construct
  source 1..144: mol_type = other RNA
aaaaaaaaaaaaaaagttgtgttaaaaaaaaaaaaaaaaaaaaaaaaagttgtggtaaaaaaaaaaaaaaaaaaaaaaaaaaaaaaaaaaaggttgtggaaaaaaaaaaaaaaaaaaaaaaaaaaaaaaaaaaaaaaaaaaaaa

SEQ ID NO: 8303 - RNA, 143 nt, synthetic construct
  source 1..143: mol_type = other RNA
aaaaaaaaaaaaaaatcctctccaaaaaaaaaaaaaaaaaaaaaaaaattccttctaaaaaaaaaaaaaaaaaaaaaaaaaaaaaaaaacctccttctaaaaaaaaaaaaaaaaaaaaaaaaaaaaaaaaaaaaaaaaaaaaa

SEQ ID NO: 8304 - RNA, 144 nt, synthetic construct
  source 1..144: mol_type = other RNA
aaaaaaaaaaaaaaacgtcgtctaaaaaaaaaaaaaaaaaaaaaaaaactgtcgctaaaaaaaaaaaaaaaaaaaaaaaaaaaaaaaaaaacctgtcctaaaaaaaaaaaaaaaaaaaaaaaaaaaaaaaaaaaaaaaaaaaaa

SEQ ID NO: 8305 - RNA, 129 nt, synthetic construct
  source 1..129: mol_type = other RNA
aaaaaaaaaaaaaaaggaaaaaaaaaaaaaaaaaaaaaaaaagggaaaaaaaaaaaaaaaaaaaaaaaaaaaaaaaaaaaggggaaaaaaaaaaaaaaaaaaaaaaaaaaaaaaaaaaaaaaaaaaaaa

SEQ ID NO: 8306 - RNA, 129 nt, synthetic construct; identical to SEQ ID NO: 8279
  source 1..129: mol_type = other RNA

SEQ ID NO: 8307 - RNA, 129 nt, synthetic construct; identical to SEQ ID NO: 8280
  source 1..129: mol_type = other RNA

SEQ ID NO: 8308 - RNA, 138 nt, synthetic construct
  source 1..138: mol_type = other RNA
aaaaaaaaaaaaaaaggggaaaaaaaaaaaaaaaaaaaaaaaaaggggggaaaaaaaaaaaaaaaaaaaaaaaaaaaaaaaaaaaggggggggaaaaaaaaaaaaaaaaaaaaaaaaaaaaaaaaaaaaaaaaaaaaa

SEQ ID NO: 8309 - RNA, 138 nt, synthetic construct
  source 1..138: mol_type = other RNA
aaaaaaaaaaaaaaaccccaaaaaaaaaaaaaaaaaaaaaaaaaccccccaaaaaaaaaaaaaaaaaaaaaaaaaaaaaaaaaacccccccccaaaaaaaaaaaaaaaaaaaaaaaaaaaaaaaaaaaaaaaaaaaaa

SEQ ID NO: 8310 - RNA, 138 nt, synthetic construct
  source 1..138: mol_type = other RNA
aaaaaaaaaaaaaaattttaaaaaaaaaaaaaaaaaaaaaaaaattttttaaaaaaaaaaaaaaaaaaaaaaaaaaaaaaaaaaatttttttttaaaaaaaaaaaaaaaaaaaaaaaaaaaaaaaaaaaaaaaaaaaa

SEQ ID NO: 8311 - RNA, 138 nt, synthetic construct
  source 1..138: mol_type = other RNA
aaaaaaaaaaaaaaacccgaaaaaaaaaaaaaaaaaaaaaaaaacccgccaaaaaaaaaaaaaaaaaaaaaaaaaaaaaaaaaaagccgcccgaaaaaaaaaaaaaaaaaaaaaaaaaaaaaaaaaaaaaaaaaaaaa

SEQ ID NO: 8312 - RNA, 138 nt, synthetic construct
  source 1..138: mol_type = other RNA
aaaaaaaaaaaaaaaggtgaaaaaaaaaaaaaaaaaaaaaaaaattgtgtaaaaaaaaaaaaaaaaaaaaaaaaaaaaaaaaaaagtggttgtaaaaaaaaaaaaaaaaaaaaaaaaaaaaaaaaaaaaaaaaaaaaa

SEQ ID NO: 8313 - RNA, 138 nt, synthetic construct
  source 1..138: mol_type = other RNA
aaaaaaaaaaaaaaactctaaaaaaaaaaaaaaaaaaaaaaaaaccttccaaaaaaaaaaaaaaaaaaaaaaaaaaaaaaaaaaacttcttctaaaaaaaaaaaaaaaaaaaaaaaaaaaaaaaaaaaaaaaaaaaaa

SEQ ID NO: 8314 - RNA, 138 nt, synthetic construct
  source 1..138: mol_type = other RNA
aaaaaaaaaaaaaaacctgaaaaaaaaaaaaaaaaaaaaaaaaagtcccgaaaaaaaaaaaaaaaaaaaaaaaaaaaaaaaaaaattgcgctgaaaaaaaaaaaaaaaaaaaaaaaaaaaaaaaaaaaaaaaaaaaaa

SEQ ID NO: 8315 - RNA, 110 nt, synthetic construct
  source 1..110: mol_type = other RNA
aaaaaaaaaaaaaaaaaaaaaaaaaaaaaagcatatgactaaaaaaaaaaaaaaaaaaaaaaaaaaaaaaaaaaaaaaaaaaaaaaaaaaaaaaaaaaaaaaaaaaaaaa

SEQ ID NO: 8316 - RNA, 80 nt, synthetic construct
  source 1..80: mol_type = other RNA
aaaaaaaaaaaaaaaaaaaaaaaaaaaaaaaaaaaaaaaaaaaaaaaaaaaaaaaaaaaaaaaaaaaaaaaaaaaaaaaa

SEQ ID NO: 8317 - RNA, 115 nt, synthetic construct
  source 1..115: mol_type = other RNA
aaaaacatcgctggagcctcggtggccatgcttcttgccccttgggcctccccccagcccctcctccccttcctgcacccgtacccccgtggtctttgaataaagtctgaagctt

SEQ ID NO: 8318 - RNA, 20 nt, synthetic construct
  source 1..20: mol_type = other RNA
ggagcggtaatgcctggtgg

SEQ ID NO: 8319 - RNA, 20 nt, synthetic construct
  source 1..20: mol_type = other RNA
ggagcagtaatggctggtgg

SEQ ID NO: 8320 - RNA, 126 nt, synthetic construct
  source 1..126: mol_type = other RNA
tcagaggaagctgggccaccgttttagagctagaaatagcaagttaaaataaggctagtccgttatcaacttgaaaaagtggcaccgagtcggtgctggagcagtaatggctggtggcccagcttc

SEQ ID NO: 8321 - RNA, 100 nt, synthetic construct
  source 1..100: mol_type = other RNA
ttaccaactttctccatggcgttttagagctagaaatagcaagttaaaataaggctagtccgttatcaacttgaaaaagtggcaccgagtcggtgctttt

SEQ ID NO: 8322-8330 - skipped (9 entries)

SEQ ID NO: 8331 - protein, 1082 aa, synthetic construct
MAAFKPNPINYILGLDIGIASVGWAMVEIDEEENPIRLIDLGVRVFERAEVPKTGDSLAMARRLARSVRRLTRRRAHRLLRARRLLKREGVLQAADFDENGLIKSLPNTPWQLRAAALDRKLTPLEWSAVLLHLIKHRGYLSQRKNEGETADKELGALLKGVANNAHALQTGDFRTPAELALNKFEKESGHIRNQRGDYSHTFSRKDLQAELILLFEKQKEFGNPHVSGGLKEGIETLLMTQRPALSGDAVQKMLGHCTFEPAEPKAAKNTYTAERFIWLTKLNNLRILEQGSERPLTDTERATLMDEPYRKSKLTYAQARKLLGLEDTAFFKGLRYGKDNAEASTLMEMKAYHAISRALEKEGLKDKKSPLNLSSELQDEIGTAFSLFKTDEDITGRLKDRVQPEILEALLKHISFDKFVQISLKALRRIVPLMEQGKRYDEACAEIYGDHYGKKNTEEKIYLPPIPADEIRNPVVLRALSQARKVINGVVRRYGSPARIHIETAREVGKSFKDRKEIEKRQEENRKDREKAAAKFREYFPNFVGEPKSKDILKLRLYEQQHGKCLYSGKEINLVRLNEKGYVEIDHALPFSRTWDDSFNNKVLVLGSENQNKGNQTPYEYFNGKDNSREWQEFKARVETSRFPRSKKQRILLQKFDEDGFKECNLNDTRYVNRFLCQFVADHILLTGKGKRRVFASNGQITNLLRGFWGLRKVRAENDRHHALDAVVVACSTVAMQQKITRFVRYKEMNAFDGKTIDKETGKVLHQKTHFPQPWEFFAQEVMIRVFGKPDGKPEFEEADTPEKLRTLLAEKLSSRPEAVHEYVTPLFVSRAPNRKMSGAHKDTLRSAKRFVKHNEKISVKRVWLTEIKLADLENMVNYKNGREIELYEALKARLEAYGGNAKQAFDPKDNPFYKKGGQLVKAVRVEKTQESGVLLNKKNAYTIADNGDMVRVDVFCKVDKKGKNQYFIVPIYAWQVAENILPDIDCKGYRIDDSYTFCFSLHKYDLIAFQKDEKSKVEFAYYINCDSSNGRFYLAWHDKGSKEQQFRISTQNLVLIQKYQVNELGKEIRPCRLKKRPPVR

SEQ ID NO: 8332 - protein, 1055 aa, synthetic construct
MQNNPLNYILGLDLGIASIGWAVVEIDEESSPIRLIDVGVRTFERAEVAKTGESLALSRRLARSSRRLIKRRAERLKKAKRLLKAEKILHSIDEKLPINVWQLRVKGLKEKLERQEWAAVLLHLSKHRGYLSQRKNEGKSDNKELGALLSGIASNHQMLQSSEYRTPAEIAVKKFQVEEGHIRNQRGSYTHTFSRLDLLAEMELLFQRQAELGNSYTSTTLLENLTALLMWQKPALAGDAILKMLGKCTFEPSEYKAAKNSYSAERFVWLTKLNNLRILENGTERALNDNERFALLEQPYEKSKLTYAQVRAMLALSDNAIFKGVRYLGEDKKTVESKTTLIEMKFYHQIRKTLGSAELKKEWNELKGNSDLLDEIGTAFSLYKTDDDICRYLEGKLPERVLNALLENLNFDKFIQLSLKALHQILPLMLQGQRYDEAVSAIYGDHYGKKSTETTRLLPTIPADEIRNPVVLRTLTQARKVINAVVRLYGSPARIHIETAREVGKSYQDRKKLEKQQEDNRKQRESAVKKFKEMFPHFVGEPKGKDILKMRLYELQQAKCLYSGKSLELHRLLEKGYVEVDHALPFSRTWDDSFNNKVLVLANENQNKGNLTPYEWLDGKNNSERWQHFVVRVQTSGFSYAKKQRILNHKLDEKGFIERNLNDTRYVARFLCNFIADNMLLVGKGKRNVFASNGQITALLRHRWGLQKVREQNDRHHALDAVVVACSTVAMQQKITRFVRYNEGNVFSGERIDRETGEIIPLHFPSPWAFFKENVEIRIFSENPKLELENRLPDYPQYNHEWVQPLFVSRMPTRKMTGQGHMETVKSAKRLNEGLSVLKVPLTQLKLSDLERMVNRDREIALYESLKARLEQFGNDPAKAFAEPFYKKGGALVKAVRLEQTQKSGVLVRDGNGVADNASMVRVDVFTKGGKYFLVPIYTWQVAKGILPNRAATQGKDENDWDIMDEMATFQFSLCQNDLIKLVTKKKTIFGYFNGLNRATSNINIKEHDLDKSKGKLGIYLEVGVKLAISLEKYQVDELGKNIRPCRPTKRQHVR

SEQ ID NO: 8333 - protein, 1053 aa, synthetic construct
MKRNYILGLDIGITSVGYGIIDYETRDVIDAGVRLFKEANVENNEGRRSKRGARRLKRRRRHRIQRVKKLLFDYNLLTDHSELSGINPYEARVKGLSQKLSEEEFSAALLHLAKRRGVHNVNEVEEDTGNELSTKEQISRNSKALEEKYVAELQLERLKKDGEVRGSINRFKTSDYVKEAKQLLKVQKAYHQLDQSFIDTYIDLLETRRTYYEGPGEGSPFGWKDIKEWYEMLMGHCTYFPEELRSVKYAYNADLYNALNDLNNLVITRDENEKLEYYEKFQIIENVFKQKKKPTLKQIAKEILVNEEDIKGYRVTSTGKPEFTNLKVYHDIKDITARKEIIENAELLDQIAKILTIYQSSEDIQEELTNLNSELTQEEIEQISNLKGYTGTHNLSLKAINLILDELWHTNDNQIAIFNRLKLVPKKVDLSQQKEIPTTLVDDFILSPVVKRSFIQSIKVINAIIKKYGLPNDIIIELAREKNSKDAQKMINEMQKRNRQTNERIEEIIRTTGKENAKYLIEKIKLHDMQEGKCLYSLEAIPLEDLLNNPFNYEVDHIIPRSVSFDNSFNNKVLVKQEENSKKGNRTPFQYLSSSDSKISYETFKKHILNLAKGKGRISKTKKEYLLEERDINRFSVQKDFINRNLVDTRYATRGLMNLLRSYFRVNNLDVKVKSINGGFTSFLRRKWKFKKERNKGYKHHAEDALIIANADFIFKEWKKLDKAKKVMENQMFEEKQAESMPEIETEQEYKEIFITPHQIKHIKDFKDYKYSHRVDKKPNRELINDTLYSTRKDDKGNTLIVNNLNGLYDKDNDKLKKLINKSPEKLLMYHHDPQTYQKLKLIMEQYGDEKNPLYKYYEETGNYLTKYSKKDNGPVIKKIKYYGNKLNAHLDITDDYPNSRNKVVKLSLKPYRFDVYLDNGVYKFVTVKNLDVIKKENYYEVNSKCYEEAKKLKKISNQAEFIASFYNNDLIKINGELYRVIGVNNDLLNRIEVNMIDITYREYLENMNDKRPPRIIKTIASKTQSIKKYSTDILGNLYEVKSKKHPQIIKKG

SEQ ID NO: 8334 - protein, 1053 aa, synthetic construct
MKRNYILGLDIGITSVGYGIIDYETRDVIDAGVRLFKEANVENNEGRRSKRGARRLKRRRRHRIQRVKKLLFDYNLLTDHSELSGINPYEARVKGLSQKLSEEEFSAALLHLAKRRGVHNVNEVEEDTGNELSTKEQISRNSKALEEKYVAELQLERLKKDGEVRGSINRFKTSDYVKEAKQLLKVQKAYHQLDQSFIDTYIDLLETRRTYYEGPGEGSPFGWKDIKEWYEMLMGHCTYFPEELRSVKYAYNADLYNALNDLNNLVITRDENEKLEYYEKFQIIENVFKQKKKPTLKQIAKEILVNEEDIKGYRVTSTGKPEFTNLKVYHDIKDITARKEIIENAELLDQIAKILTIYQSSEDIQEELTNLNSELTQEEIEQISNLKGYTGTHNLSLKAINLILDELWHTNDNQIAIFNRLKLVPKKVDLSQQKEIPTTLVDDFILSPVVKRSFIQSIKVINAIIKKYGLPNDIIIELAREKNSKDAQKMINEMQKRNRQTNERIEEIIRTTGKENAKYLIEKIKLHDMQEGKCLYSLEAIPLEDLLNNPFNYEVDHIIPRSVSFDNSFNNKVLVKQEENSKKGNRTPFQYLSSSDSKISYETFKKHILNLAKGKGRISKTKKEYLLEERDINRFSVQKDFINRNLVDTRYATRGLMNLLRSYFRVNNLDVKVKSINGGFTSFLRRKWKFKKERNKGYKHHAEDALIIANADFIFKEWKKLDKAKKVMENQMFEEKQAESMPEIETEQEYKEIFITPHQIKHIKDFKDYKYSHRVDKKPNRKLINDTLYSTRKDDKGNTLIVNNLNGLYDKDNDKLKKLINKSPEKLLMYHHDPQTYQKLKLIMEQYGDEKNPLYKYYEETGNYLTKYSKKDNGPVIKKIKYYGNKLNAHLDITDDYPNSRNKVVKLSLKPYRFDVYLDNGVYKFVTVKNLDVIKKENYYEVNSKCYEEAKKLKKISNQAEFIASFYKNDLIKINGELYRVIGVNNDLLNRIEVNMIDITYREYLENMNDKRPPHIIKTIASKTQSIKKYSTDILGNLYEVKSKKHPQIIKKG

SEQ ID NO: 8335 - protein, 1061 aa, synthetic construct
MQENQQKQNYILGLDIGITSVGYGLIDSKTREVIDAGVRLFPEADSENNSNRRSKRGARRLKRRRIHRLNRVKDLLADYQMIDLNNVPKSTDPYTIRVKGLREPLTKEEFAIALLHIAKRRGLHNISVSMGDEEQDNELSTKQQLQKNAQQLQDKYVCELQLERLTNINKVRGEKNRFKTEDFVKEVKQLCETQRQYHNIDDQFIQQYIDLVSTRREYFEGPGNGSPYGWDGDLLKWYEKLMGRCTYFPEELRSVKYAYSADLFNALNDLNNLVVTRDDNPKLEYYEKYHIIENVFKQKKNPTLKQIAKEIGVQDYDIRGYRITKSGKPQFTSFKLYHDLKNIFEQAKYLEDVEMLDEIAKILTIYQDEISIKKALDQLPELLTESEKSQIAQLTGYTGTHRLSLKCIHIVIDELWESPENQMEIFTRLNLKPKKVEMSEIDSIPTTLVDEFILSPVVKRAFIQSIKVINAVINRFGLPEDIIIELAREKNSKDRRKFINKLQKQNEATRKKIEQLLAKYGNTNAKYMIEKIKLHDMQEGKCLYSLEAIPLEDLLSNPTHYEVDHIIPRSVSFDNSLNNKVLVKQSENSKKGNRTPYQYLSSNESKISYNQFKQHILNLSKAKDRISKKKRDMLLEERDINKFEVQKEFINRNLVDTRYATRELSNLLKTYFSTHDYAVKVKTINGGFTNHLRKVWDFKKHRNHGYKHHAEDALVIANADFLFKTHKALRRTDKILEQPGLEVNDTTVKVDTEEKYQELFETPKQVKNIKQFRDFKYSHRVDKKPNRQLINDTLYSTREIDGETYVVQTLKDLYAKDNEKVKKLFTERPQKILMYQHDPKTFEKLMTILNQYAEAKNPLAAYYEDKGEYVTKYAKKGNGPAIHKIKYIDKKLGSYLDVSNKYPETQNKLVKLSLKSFRFDIYKCEQGYKMVSIGYLDVLKKDNYYYIPKDKYEAEKQKKKIKESDLFVGSFYYNDLIMYEDELFRVIGVNSDINNLVELNMVDITYKDFCEVNNVTGEKRIKKTIGKRVVLIEKYTTDILGNLYKTPLPKKPQLIFKRGEL

SEQ ID NO: 8336 - protein, 1061 aa, synthetic construct
MQENQQKQNYILGLDIGITSVGYGLIDSKTREVIDAGVRLFPEADSENNSNRRSKRGARRLKRRRIHRLNRVKDLLADYQMIDLNNVPKSTDPYTIRVKGLREPLTKEEFAIALLHIAKRRGLHNISVSMGDEEQDNELSTKQQLQKNAQQLQDKYVCELQLERLTNINKVRGEKNRFKTEDFVKEVKQLCETQRQYHNIDDQFIQQYIDLVSTRREYFEGPGNGSPYGWDGDLLKWYEKLMGRCTYFPEELRSVKYAYSADLFNALNDLNNLVVTRDDNPKLEYYEKYHIIENVFKQKKNPTLKQIAKEIGVQDYDIRGYRITKSGKPQFTSFKLYHDLKNIFEQAKYLEDVEMLDEIAKILTIYQDEISIKKALDQLPELLTESEKSQIAQLTGYTGTHRLSLKCIHIVIDELWESPENQMEIFTRLNLKPKKVEMSEIDSIPTTLVDEFILSPVVKRAFIQSIKVINAVINRFGLPEDIIIELAREKNSKDRRKFINKLQKQNEATRKKIEQLLAKYGNTNAKYMIEKIKLHDMQEGKCLYSLEAIPLEDLLSNPTHYEVDHIIPRSVSFDNSLNNKVLVKQSENSKKGNRTPYQYLSSNESKISYNQFKQHILNLSKAKDRISKKKRDMLLEERDINKFEVQKEFINRNLVDTRYATRELSNLLKTYFSTHDYAVKVKTINGGFTNHLRKVWDFKKHRNHGYKHHAEDALVIANADFLFKTHKALRRTDKILEQPGLEVNDTTVKVDTEEKYQELFETPKQVKNIKQFRDFKYSHRVDKKPNRKLINDTLYSTREIDGETYVVQTLKDLYAKDNEKVKKLFTERPQKILMYQHDPKTFEKLMTILNQYAEAKNPLAAYYEDKGEYVTKYAKKGNGPAIHKIKYIDKKLGSYLDVSNKYPETQNKLVKLSLKSFRFDIYKCEQGYKMVSIGYLDVLKKDNYYYIPKDKYEAEKQKKKIKESDLFVGSFYKNDLIMYEDELFRVIGVNSDINNLVELNMVDITYKDFCEVNNVTGEKHIKKTIGKRVVLIEKYTTDILGNLYKTPLPKKPQLIFKRGEL

SEQ ID NO: 8337 - protein, 1375 aa, synthetic construct
MEKKYSIGLDIGTNSVGWAVITDDYKVPSKKFKVLGNTNRKSIKKNLMGALLFDSGETAEATRLKRTARRRYTRRKNRIRYLQEIFANEMAKLDDSFFQRLEESFLVEEDKKNERHPIFGNLADEVAYHRNYPTIYHLRKKLADSPEKADLRLIYLALAHIIKFRGHFLIEGKLNAENSDVAKLFYQLIQTYNQLFEESPLDEIEVDAKGILSARLSKSKRLEKLIAVFPNEKKNGLFGNIIALALGLTPNFKSNFDLTEDAKLQLSKDTYDDDLDELLGQIGDQYADLFSAAKNLSDAILLSDILRSNSEVTKAPLSASMVKRYDEHHQDLALLKTLVRQQFPEKYAEIFKDDTKNGYAGYVGADKKLRKRSGKLATEEEFYKFIKPILEKMDGAEELLAKLNRDDLLRKQRTFDNGSIPHQIHLKELHAILRRQEEFYPFLKENREKIEKILTFRIPYYVGPLARGNSRFAWLTRKSEEAITPWNFEEVVDKGASAQSFIERMTNFDEQLPNKKVLPKHSLLYEYFTVYNELTKVKYVTERMRKPEFLSGEQKKAIVDLLFKTNRKVTVKQLKEDYFKKIECFDSVEIIGVEDRFNASLGTYHDLLKIIKDKDFLDNEENEDILEDIVLTLTLFEDREMIEERLKTYAHLFDDKVMKQLKRRHYTGWGRLSRKMINGIRDKQSGKTILDFLKSDGFSNRNFMQLIHDDSLTFKEEIEKAQVSGQGDSLHEQIADLAGSPAIKKGILQTVKIVDELVKVMGHKPENIVIEMARENQTTTKGLQQSRERKKRIEEGIKELESQILKENPVENTQLQNEKLYLYYLQNGRDMYVDQELDINRLSDYDVDHIVPQSFIKDDSIDNKVLTRSVENRGKSDNVPSEEVVKKMKNYWRQLLNAKLITQRKFDNLTKAERGGLSEADKAGFIKRQLVETRQITKHVARILDSRMNTKRDKNDKPIREVKVITLKSKLVSDFRKDFQLYKVRDINNYHHAHDAYLNAVVGTALIKKYPKLESEFVYGDYKVYDVRKMIAKSEQEIGKATAKRFFYSNIMNFFKTEVKLANGEIRKRPLIETNGETGEVVWNKEKDFATVRKVLAMPQVNIVKKTEVQTGGFSKESILSKRESAKLIPRKKGWDTRKYGGFGSPTVAYSILVVAKVEKGKAKKLKSVKVLVGITIMEKGSYEKDPIGFLEAKGYKDIKKELIFKLPKYSLFELENGRRRMLASAKELQKANELVLPQHLVRLLYYTQNISATTGSNNLGYIEQHREEFKEIFEKIIDFSEKYILKNKVNSNLKSSFDEQFAVSDSILLSNSFVSLLKYTSFGASGGFTFLDLDVKQGRLRYQTVTEVLDATLIYQSITGLYETRTDLSQLGGD

SEQ ID NO: 8338 - protein, 1368 aa, synthetic construct [sequence omitted]

SEQ ID NO: 8339 - protein, 1368 aa, synthetic construct
MDKKYSIGLDIGTNSVGWAVITDEYKVPSKKFKVLGNTDRHSIKKNLIGALLFDSGETAEATRLKRTARRRYTRRKNRICYLQEIFSNEMAKVDDSFFHRLEESFLVEEDKKHERHPIFGNIVDEVAYHEKYPTIYHLRKKLVDSTDKADLRLIYLALAHMIKFRGHFLIEGDLNPDNSDVDKLFIQLVQTYNQLFEENPINASGVDAKAILSARLSKSRRLENLIAQLPGEKKNGLFGNLIALSLGLTPNFKSNFDLAEDAKLQLSKDTYDDDLDNLLAQIGDQYADLFLAAKNLSDAILLSDILRVNTEITKAPLSASMIKRYDEHHQDLTLLKALVRQQLPEKYKEIFFDQSKNGYAGYIDGGASQEEFYKFIKPILEKMDGTEELLVKLNREDLLRKQRTFDNGSIPHQIHLGELHAILRRQEDFYPFLKDNREKIEKILTFRIPYYVGPLARGNSRFAWMTRKSEETITPWNFEEVVDKGASAQSFIERMTNFDKNLPNEKVLPKHSLLYEYFTVYNELTKVKYVTEGMRKPAFLSGEQKKAIVDLLFKTNRKVTVKQLKEDYFKKIECFDSVEISGVEDRFNASLGTYHDLLKIIKDKDFLDNEENEDILEDIVLTLTLFEDREMIEERLKTYAHLFDDKVMKQLKRRRYTGWGRLSRKLINGIRDKQSGKTILDFLKSDGFANRNFMQLIHDDSLTFKEDIQKAQVSGQGDSLHEHIANLAGSPAIKKGILQTVKVVDELVKVMGRHKPENIVIEMARENQTTQKGQKNSRERMKRIEEGIKELGSQILKEHPVENTQLQNEKLYLYYLQNGRDMYVDQELDINRLSDYDVDHIVPQSFLKDDSIDNKVLTRSDKNRGKSDNVPSEEVVKKMKNYWRQLLNAKLITQRKFDNLTKAERGGLSELDKAGFIKRQLVETRQITKHVAQILDSRMNTKYDENDKLIREVKVITLKSKLVSDFRKDFQFYKVREINNYHHAHDAYLNAVVGTALIKKYPKLESEFVYGDYKVYDVRKMIAKSEQEIGKATAKYFFYSNIMNFFKTEITLANGEIRKRPLIETNGETGEIVWDKGRDFATVRKVLSMPQVNIVKKTEVQTGGFSKESIRPKRNSDKLIARKKDWDPKKYGGFVSPTVAYSVLVVAKVEKGKSKKLKSVKELLGITIMERSSFEKNPIDFLEAKGYKEVKKDLIIKLPKYSLFELENGRKRMLASARFLQKGNELALPSKYVNFLYLASHYEKLKGSPEDNEQKQLFVEQHKHYLDEIIEQISEFSKRVILADANLDKVLSAYNKHRDKPIREQAENIIHLFTLTNLGAPRAFKYFDTTIDRKVYRSTKEVLDATLIHQSITGLYETRIDLSQLGGD

SEQ ID NO: 8340 - protein, 1368 aa, synthetic construct
MDKKYSIGLDIGTNSVGWAVITDEYKVPSKKFKVLGNTDRHSIKKNLIGALLFDSGETAERTRLKRTARRRYTRRKNRICYLQEIFSNEMAKVDDSFFHRLEESFLVEEDKKHERHPIFGNIVDEVAYHEKYPTIYHLRKKLVDSTDKADLRLIYLALAHMIKFRGHFLIEGDLNPDNSDVDKLFIQLVQTYNQLFEENPINASGVDAKAILSARLSKSRRLENLIAQLPGEKKNGLFGNLIALSLGLTPNFKSNFDLAEDAKLQLSKDTYDDDLDNLLAQIGDQYADLFLAAKNLSDAILLSDILRVNTEITKAPLSASMIKRYDEHHQDLTLLKALVRQQLPEKYKEIFFDQSKNGYAGYIDGGASQEEFYKFIKPILEKMDGTEELLVKLNREDLLRKQRTFDNGSIPHQIHLGELHAILRRQEDFYPFLKDNREKIEKILTFRIPYYVGPLARGNSRFAWMTRKSEETITPWNFEEVVDKGASAQSFIERMTNFDKNLPNEKVLPKHSLLYEYFTVYNELTKVKYVTEGMRKPAFLSGEQKKAIVDLLFKTNRKVTVKQLKEDYFKKIECFDSVEISGVEDRFNASLGTYHDLLKIIKDKDFLDNEENEDILEDIVLTLTLFEDREMIEERLKTYAHLFDDKVMKQLKRRRYTGWGRLSRKLINGIRDKQSGKTILDFLKSDGFANRNFMQLIHDDSLTFKEDIQKAQVSGQGDSLHEHIANLAGSPAIKKGILQTVKVVDELVKVMGRHKPENIVIEMARENQTTQKGQKNSRERMKRIEEGIKELGSQILKEHPVENTQLQNEKLYLYYLQNGRDMYVDQELDINRLSDYDVDHIVPQSFLKDDSIDNKVLTRSDKNRGKSDNVPSEEVVKKMKNYWRQLLNAKLITQRKFDNLTKAERGGLSELDKAGFIKRQLVETRQITKHVAQILDSRMNTKYDENDKLIREVKVITLKSKLVSDFRKDFQFYKVREINNYHHAHDAYLNAVVGTALIKKYPKLESEFVYGDYKVYDVRKMIAKSEQEIGKATAKYFFYSNIMNFFKTEITLANGEIRKRPLIETNGETGEIVWDKGRDFATVRKVLSMPQVNIVKKTEVQTGGFSKESIRPKRNSDKLIARKKDWDPKKYGGFLWPTVAYSVLVVAKVEKGKSKKLKSVKELLGITIMERSSFEKNPIDFLEAKGYKEVKKDLIIKLPKYSLFELENGRKRMLASAKQLQKGNELALPSKYVNFLYLASHYEKLKGSPEDNEQKQLFVEQHKHYLDEIIEQISEFSKRVILADANLDKVLSAYNKHRDKPIREQAENIIHLFTLTRLGAPRAFKYFDTTIDPKQYRSTKEVLDATLIHQSITGLYETRIDLSQLGGD

SEQ ID NO: 8341 - protein, 1121 aa, synthetic construct
MSDLVLGLDIGIGSVGVGILNKVTGEIIHKNSRIFPAAQAENNLVRRTNRQGRRLARRKKHRRVRLNRLFEESGLITDFTKISINLNPYQLRVKGLTDELSNEELFIALKNMVKHRGISYLDDASDDGNSSVGDYAQIVKENSKQLETKTPGQIQLERYQTYGQLRGDFTVEKDGKKHRLINVFPTSAYRSEALRILQTQQEFNPQITDEFINRYLEILTGKRKYYHGPGNEKSRTDYGRYRTSGETLDNIFGILIGKCTFYPDEFRAAKASYTAQEFNLLNDLNNLTVPTETKKLSKEQKNQIINYVKNEKAMGPAKLFKYIAKLLSCDVADIKGYRIDKSGKAEIHTFEAYRKMKTLETLDIEQMDRETLDKLAYVLTLNTEREGIQEALEHEFADGSFSQKQVDELVQFRKANSSIFGKGWHNFSVKLMMELIPELYETSEEQMTILTRLGKQKTTSSSNKTKYIDEKLLTEEIYNPVVAKSVRQAIKIVNAAIKEYGDFDNIVIEMARETNEDDEKKAIQKIQKANKDEKDAAMLKAANQYNGKAELPHSVFHGHKQLATKIRLWHQQGERCLYTGKTISIHDLINNSNQFEVDHILPLSITFDDSLANKVLVYATANQEKGQRTPYQALDSMDDAWSFRELKAFVRESKTLSNKKKEYLLTEEDISKFDVRKKFIERNLVDTRYASRVVLNALQEHFRAHKIDTKVSVVRGQFTSQLRRHWGIEKTRDTYHHHAVDALIIAASSQLNLWKKQKNTLVSYSEDQLLDIETGELISDDEYKESVFKAPYQHFVDTLKSKEFEDSILFSYQVDSKFNRKISDATIYATRQAKVGKDKADETYVLGKIKDIYTQDGYDAFMKIYKKDKSKFLMYRHDPQTFEKVIEPILENYPNKQINEKGKEVPCNPFLKYKEEHGYIRKYSKKGNGPEIKSLKYYDSKLGNHIDITPKDSNNKVVLQSVSPWRADVYFNKTTGKYEILGLKYADLQFEKGTGTYKISQEKYNDIKKKEGVDSDSEFKFTLYKNDLLLVKDTETKEQQLFRFLSRTMPKQKHYVELKPYDKQKFEGGEALIKVLGNVANSGQCKKGLGKSNISIYKVRTDVLGNQHIIKNEGDKPKLDF

SEQ ID NO: 8342 - protein, 1092 aa, synthetic construct
MAYTMGIDVGIASCGWAIVDLERQRIIDIGVRTFEKAENPKNGEALAVPRREARSSRRRLRRKKHRIERLKHMFVRNGLAVDIQHLEQTLRSQNEIDVWQLRVDGLDRMLTQKEWLRVLIHLAQRRGFQSNRKTDGSSEDGQVLVNVTENDRLMEEKDYRTVAEMMVKDEKFSDHKRNKNGNYHGVVSRSSLLVEIHTLFETQRQHHNSLASKDFELEYVNIWSAQRPVATKDQIEKMIGTCTFLPKEKRAPKASWHFQYFMLLQTINHIRITNVQGTRSLNKEEIEQVVNMALTKSKVSYHDTRKILDLSEEYQFVGLDYGKEDEKKKVESKETIIKLDDYHKLNKIFNEVELAKGETWEADDYDTVAYALTFFKDDEDIRDYLQNKYKDSKNRLVKNLANKEYTNELIGKVSTLSFRKVGHLSLKALRKIIPFLEQGMTYDKACQAAGFDFQGISKKKRSVVLPVIDQISNPVVNRALTQTRKVINALIKKYGSPETIHIETARELSKTFDERKNITKDYKENRDKNEHAKKHLSELGIINPTGLDIVKYKLWCEQQGRCMYSNQPISFERLKESGYTEVDHIIPYSRSMNDSYNNRVLVMTRENREKGNQTPFEYMGNDTQRWYEFEQRVTTNPQIKKEKRQNLLLKGFTNRRELEMLERNLNDTRYITKYLSHFISTNLEFSPSDKKKKVVNTSGRITSHLRSRWGLEKNRGQNDLHHAMDAIVIAVTSDSFIQQVTNYYKRKERRELNGDDKFPLPWKFFREEVIARLSPNPKEQIEALPNHFYSEDELADLQPIFVSRMPKRSITGEAHQAQFRRVVGKTKEGKNITAKKTALVDISYDKNGDFNMYGRETDPATYEAIKERYLEFGGNVKKAFSTDLHKPKKDGTKGPLIKSVRIMENKTLVHPVNKGKGVVYNSSIVRTDVFQRKEKYYLLPVYVTDVTKGKLPNKVIVAKKGYHDWIEVDDSFTFLFSLYPNDLIFIRQNPKKKISLKKRIESHSISDSKEVQEIHAYYKGVDSSTAAIEFIIHDGSYYAKGVGVQNLDCFEKYQVDILGNYFKVKGEKRLELETSDSNHKGKDVNSIKSTSR

SEQ ID NO: 8343 - protein, 1053 aa, synthetic construct
MKRNYILGLDIGITSVGYGIIDYETRDVIDAGVRLFKEANVENNEGRRSKRGARRLKRRRRHRIQRVKKLLFDYNLLTDHSELSGINPYEARVKGLSQKLSEEEFSAALLHLAKRRGVHNVNEVEEDTGNELSTKEQISRNSKALEEKYVAELQLERLKKDGEVRGSINRFKTSDYVKEAKQLLKVQKAYHQLDQSFIDTYIDLLETRRTYYEGPGEGSPFGWKDIKEWYEMLMGHCTYFPEELRSVKYAYNADLYNALNDLNNLVITRDENEKLEYYEKFQIIENVFKQKKKPTLKQIAKEILVNEEDIKGYRVTSTGKPEFTNLKVYHDIKDITARKEIIENAELLDQIAKILTIYQSSEDIQEELTNLNSELTQEEIEQISNLKGYTGTHNLSLKAINLILDELWHTNDNQIAIFNRLKLVPKKVDLSQQKEIPTTLVDDFILSPVVKRSFIQSIKVINAIIKKYGLPNDIIIELAREKNSKDAQKMINEMQKRNRQTNERIEEIIRTTGKENAKYLIEKIKLHDMQEGKCLYSLEAIPLEDLLNNPFNYEVDHIIPRSVSFDNSFNNKVLVKQEENSKKGNRTPFQYLSSSDSKISYETFKKHILNLAKGKGRISKTKKEYLLEERDINRFSVQKDFINRNLVDTRYATRGLMNLLRSYFRVNNLDVKVKSINGGFTSFLRRKWKFKKERNKGYKHHAEDALIIANADFIFKEWKKLDKAKKVMENQMFEEKQAESMPEIETEQEYKEIFITPHQIKHIKDFKDYKYSHRVDKKPNRKLINDTLYSTRKDDKGNTLIVNNLNGLYDKDNDKLKKLINKSPEKLLMYHHDPQTYQKLKLIMEQYGDEKNPLYKYYEETGNYLTKYSKKDNGPVIKKIKYYGNKLNAHLDITDDYPNSRNKVVKLSLKPYRFDVYLDNGVYKFVTVKNLDVIKKENYYEVNSKCYEEAKKLKKISNQAEFIASFYKNDLIKINGELYRVIGVNSDKNNLIEVNMIDITYREYLENMNDKRPPHIIKTIASKTQSIKKYSTDILGNLYEVKSKKHPQIIKKG

SEQ ID NO: 8344 - protein, 1053 aa, synthetic construct
MKRNYILGLDIGITSVGYGIIDYETRDVIDAGVRLFKEANVENNEGRRSKRGARRLKRRRRHRIQRVKKLLFDYNLLTDHSELSGINPYEARVKGLSQKLSEEEFSAALLHLAKRRGVHNVNEVEEDTGNELSTKEQISRNSKALEEKYVAELQLERLKKDGEVRGSINRFKTSDYVKEAKQLLKVQKAYHQLDQSFIDTYIDLLETRRTYYEGPGEGSPFGWKDIKEWYEMLMGHCTYFPEELRSVKYAYNADLYNALNDLNNLVITRDENEKLEYYEKFQIIENVFKQKKKPTLKQIAKEILVNEEDIKGYRVTSTGKPEFTNLKVYHDIKDITARKEIIENAELLDQIAKILTIYQSSEDIQEELTNLNSELTQEEIEQISNLKGYTGTHNLSLKAINLILDELWHTNDNQIAIFNRLKLVPKKVDLSQQKEIPTTLVDDFILSPVVKRSFIQSIKVINAIIKKYGLPNDIIIELAREKNSKDAQKMINEMQKRNRQTNERIEEIIRTTGKENAKYLIEKIKLHDMQEGKCLYSLEAIPLEDLLNNPFNYEVDHIIPRSVSFDNSFNNKVLVKQEENSKKGNRTPFQYLSSSDSKISYETFKKHILNLAKGKGRISKTKKEYLLEERDINRFSVQKDFINRNLVDTRYATRGLMNLLRSYFRVNNLDVKVKSINGGFTSFLRRKWKFKKERNKGYKHHAEDALIIANADFIFKEWKKLDKAKKVMENQMFEEKQAESMPEIETEQEYKEIFITPHQIKHIKDFKDYKYSHRVDKKPNRKLINDTLYSTRKDDKGNTLIVNNLNGLYDKDNDKLKKLINKSPEKLLMYHHDPQTYQKLKLIMEQYGDEKNPLYKYYEETGNYLTKYSKKDNGPVIKKIKYYGNKLNAHLDITDDYPNSRNKVVKLSLKPYRFDVYLDNGVYKFVTVKNLDVIKKENYYEVNSKCYEEAKKLKKISNQAEFIASFYKNDLIKINGELYRVIGVNNSTRNIVELNMIDITYREYLENMNDKRPPHIIKTIASKTQSIKKYSTDILGNLYEVKSKKHPQIIKKG

SEQ ID NO: 8345 - protein, 1053 aa, synthetic construct
MKRNYILGLDIGITSVGYGIIDYETRDVIDAGVRLFKEANVENNEGRRSKRGARRLKRRRRHRIQRVKKLLFDYNLLTDHSELSGINPYEARVKGLSQKLSEEEFSAALLHLAKRRGVHNVNEVEEDTGNELSTKEQISRNSKALEEKYVAELQLERLKKDGEVRGSINRFKTSDYVKEAKQLLKVQKAYHQLDQSFIDTYIDLLETRRTYYEGPGEGSPFGWKDIKEWYEMLMGHCTYFPEELRSVKYAYNADLYNALNDLNNLVITRDENEKLEYYEKFQIIENVFKQKKKPTLKQIAKEILVNEEDIKGYRVTSTGKPEFTNLKVYHDIKDITARKEIIENAELLDQIAKILTIYQSSEDIQEELTNLNSELTQEEIEQISNLKGYTGTHNLSLKAINLILDELWHTNDNQIAIFNRLKLVPKKVDLSQQKEIPTTLVDDFILSPVVKRSFIQSIKVINAIIKKYGLPNDIIIELAREKNSKDAQKMINEMQKRNRQTNERIEEIIRTTGKENAKYLIEKIKLHDMQEGKCLYSLEAIPLEDLLNNPFNYEVDHIIPRSVSFDNSFNNKVLVKQEENSKKGNRTPFQYLSSSDSKISYETFKKHILNLAKGKGRISKTKKEYLLEERDINRFSVQKDFINRNLVDTRYATRGLMNLLRSYFRVNNLDVKVKSINGGFTSFLRRKWKFKKERNKGYKHHAEDALIIANADFIFKEWKKLDKAKKVMENQMFEEKQAESMPEIETEQEYKEIFITPHQIKHIKDFKDYKYSHRVDKKPNRKLINDTLYSTRKDDKGNTLIVNNLNGLYDKDNDKLKKLINKSPEKLLMYHHDPQTYQKLKLIMEQYGDEKNPLYKYYEETGNYLTKYSKKDNGPVIKKIKYYGNKLNAHLDITDDYPNSRNKVVKLSLKPYRFDVYLDNGVYKFVTVKNLDVIKKENYYEVNSKCYEEAKKLKKISNQAEFIASFYKNDLIKINGELYRVIGVNSDDRNIIELNMIDITYREYLENMNDKRPPHIIKTIASKTQSIKKYSTDILGNLYEVKSKKHPQIIKKG

SEQ ID NO: 8346 - protein, 1053 aa, synthetic construct
MKRNYILGLDIGITSVGYGIIDYETRDVIDAGVRLFKEANVENNEGRRSKRGARRLKRRRRHRIQRVKKLLFDYNLLTDHSELSGINPYEARVKGLSQKLSEEEFSAALLHLAKRRGVHNVNEVEEDTGNELSTKEQISRNSKALEEKYVAELQLERLKKDGEVRGSINRFKTSDYVKEAKQLLKVQKAYHQLDQSFIDTYIDLLETRRTYYEGPGEGSPFGWKDIKEWYEMLMGHCTYFPEELRSVKYAYNADLYNALNDLNNLVITRDENEKLEYYEKFQIIENVFKQKKKPTLKQIAKEILVNEEDIKGYRVTSTGKPEFTNLKVYHDIKDITARKEIIENAELLDQIAKILTIYQSSEDIQEELTNLNSELTQEEIEQISNLKGYTGTHNLSLKAINLILDELWHTNDNQIAIFNRLKLVPKKVDLSQQKEIPTTLVDDFILSPVVKRSFIQSIKVINAIIKKYGLPNDIIIELAREKNSKDAQKMINEMQKRNRQTNERIEEIIRTTGKENAKYLIEKIKLHDMQEGKCLYSLEAIPLEDLLNNPFNYEVDHIIPRSVSFDNSFNNKVLVKQEENSKKGNRTPFQYLSSSDSKISYETFKKHILNLAKGKGRISKTKKEYLLEERDINRFSVQKDFINRNLVDTRYATRGLMNLLRSYFRVNNLDVKVKSINGGFTSFLRRKWKFKKERNKGYKHHAEDALIIANADFIFKEWKKLDKAKKVMENQMFEEKQAESMPEIETEQEYKEIFITPHQIKHIKDFKDYKYSHRVDKKPNRKLINDTLYSTRKDDKGNTLIVNNLNGLYDKDNDKLKKLINKSPEKLLMYHHDPQTYQKLKLIMEQYGDEKNPLYKYYEETGNYLTKYSKKDNGPVIKKIKYYGNKLNAHLDITDDYPNSRNKVVKLSLKPYRFDVYLDNGVYKFVTVKNLDVIKKENYYEVNSKCYEEAKKLKKISNQAEFIASFYKNDLIKINGELYRVIGVNNNRLNKIELNMIDITYREYLENMNDKRPPHIIKTIASKTQSIKKYSTDILGNLYEVKSKKHPQIIKKG

SEQ ID NO: 8347 - protein, 1084 aa, synthetic construct
MKYHVGIDVGTFSVGLAAIEVDDAGMPIKTLSLVSHIHDSGLDPDEIKSAVTRLASSGIARRTRRLYRRKRRRLQQLDKFIQRQGWPVIELEDYSDPLYPWKVRAELAASYIADEKERGEKLSVALRHIARHRGWRNPYAKVSSLYLPDGPSDAFKAIREEIKRASGQPVPETATVGQMVTLCELGTLKLRGEGGVLSARLQQSDYAREIQEICRMQEIGQELYRKIIDVVFAAESPKGSASSRVGKDPLQPGKNRALKASDAFQRYRIAALIGNLRVRVDGEKRILSVEEKNLVFDHLVNLTPKKEPEWVTIAEILGIDRGQLIGTATMTDDGERAGARPPTHDTNRSIVNSRIAPLVDWWKTASALEQHAMVKALSNAEVDDFDSPEGAKVQAFFADLDDDVHAKLDSLHLPVGRAAYSEDTLVRLTRRMLSDGVDLYTARLQEFGIEPSWTPPTPRIGEPVGNPAVDRVLKTVSRWLESATKTWGAPERVIIEHVREGFVTEKRAREMDGDMRRRAARNAKLFQEMQEKLNVQGKPSRADLWRYQSVQRQNCQCAYCGSPITFSNSEMDHIVPRAGQGSTNTRENLVAVCHRCNQSKGNTPFAIWAKNTSIEGVSVKEAVERTRHWVTDTGMRSTDFKKFTKAVVERFQRATMDEEIDARSMESVAWMANELRSRVAQHFASHGTTVRVYRGSLTAEARRASGISGKLKFFDGVGKSRLDRRHHAIDAAVIAFTSDYVAETLAVRSNLKQSQAHRQEAPQWREFTGKDAEHRAAWRVWCQKMEKLSALLTEDLRDDRVVVMSNVRLRLGNGSAHKETIGKLSKVKLSSQLSVSDIDKASSEALWCALTREPGFDPKEGLPANPERHIRVNGTHVYAGDNIGLFPVSAGSIALRGGYAELGSSFHHARVYKITSGKKPAFAMLRVYTIDLLPYRNQDLFSVELKPQTMSMRQAEKKLRDALATGNAEYLGWLVVDDELVVDTSKIATDQVKAVEAELGTIRRWRVDGFFSPSKLRLRPLQMSKEGIKKESAPELSKIIDRPGWLPAVNKLFSDGNVTVVRRDSLGRVRLESTAHLPVTWKVQ

SEQ ID NO: 8348 - protein, 984 aa, synthetic construct
MARILAFDIGISSIGWAFSENDELKDCGVRIFTKVENPKTGESLALPRRLARSARKRLARRKARLNHLKHLIANEFKLNYEDYQSFDESLAKAYKGSLISPYELRFRALNELLSKQDFARVILHIAKRRGYDDIKNSDDKEKGAILKAIKQNEEKLANYQSVGEYLYKEYFQKFKENSKEFTNVRNKKESYERCIAQSFLKDELKLIFKKQREFGFSFSKKFEEEVLSVAFYKRALKDFSHLVGNCSFFTDEKRAPKNSPLAFMFVALTRIINLLNNLKNTEGILYTKDDLNALLNEVLKNGTLTYKQTKKLLGLSDDYEFKGEKGTYFIEFKKYKEFIKALGEHNLSQDDLNEIAKDITLIKDEIKLKKALAKYDLNQNQIDSLSKLEFKDHLNISFKALKLVTPLMLEGKKYDEACNELNLKVAINEDKKDFLPAFNETYYKDEVTNPVVLRAIKEYRKVLNALLKKYGKVHKINIELAREVGKNHSQRAKIEKEQNENYKAKKDAELECEKLGLKINSKNILKLRLFKEQKEFCAYSGEKIKISDLQDEKMLEIDHIYPYSRSFDDSYMNKVLVFTKQNQEKLNQTPFEAFGNDSAKWQKIEVLAKNLPTKKQKRILDKNYKDKEQKNFKDRNLNDTRYIARLVLNYTKDYLDFLPLSDDENTKLNDTQKGSKVHVEAKSGMLTSALRHTWGFSAKDRNNHLHHAIDAVIIAYANNSIVKAFSDFKKEQESNSAELYAKKISELDYKNKRKFFEPFSGFRQKVLDKIDEIFVSKPERKKPSGALHEETFRKEEEFYQSYGGKEGVLKALELGKIRKVNGKIVKNGDMFRVDIFKHKKTNKFYAVPIYTMDFALKVLPNKAVARSKKGEIKDWILMDENYEFCFSLYKDSLILIQTKDMQEPEFVYYNAFTSSTVSLIVSKHDNKFETLSKNQKILFKNANEKEVIAKSIGIQNLKVFEKYIVSALGEVTKAEFRQREDFKK

SEQ ID NO: 8349 - protein, 1087 aa, synthetic construct
MRYKIGLDIGITSVGWAVMNLDIPRIEDLGVRIFDRAENPQTGESLALPRRLARSARRRLRRRKHRLERIRRLVIREGILTKEELDKLFEEKHEIDVWQLRVEALDRKLNNDELARVLLHLAKRRGFKSNRKSERSNKENSTMLKHIEENRAILSSYRTVGEMIVKDPKFALHKRNKGENYTNTIARDDLEREIRLIFSKQREFGNMSCTEEFENEYITIWASQRPVASKDDIEKKVGFCTFEPKEKRAPKATYTFQSFIAWEHINKLRLISPSGARGLTDEERRLLYEQAFQKNKITYHDIRTLLHLPDDTYFKGIVYDRGESRKQNENIRFLELDAYHQIRKAVDKVYGKGKSSSFLPIDFDTFGYALTLFKDDADIHSYLRNEYEQNGKRMPNLANKVYDNELIEELLNLSFTKFGHLSLKALRSILPYMEQGEVYSSACERAGYTFTGPKKKQKTMLLPNIPPIANPVVMRALTQARKVVNAIIKKYGSPVSIHIELARDLSQTFDERRKTKKEQDENRKKNETAIRQLMEYGLTLNPTGHDIVKFKLWSEQNGRCAYSLQPIEIERLLEPGYVEVDHVIPYSRSLDDSYTNKVLVLTRENREKGNRIPAEYLGVGTERWQQFETFVLTNKQFSKKKRDRLLRLHYDENEETEFKNRNLNDTRYISRFFANFIREHLKFAESDDKQKVYTVNGRVTAHLRSRWEFNKNREESDLHHAVDAVIVACTTPSDIAKVTAFYQRREQNKELAKKTEPHFPQPWPHFADELRARLSKHPKESIKALNLGNYDDQKLESLQPVFVSRMPKRSVTGAAHQETLRRYVGIDERSGKIQTVVKTKLSEIKLDASGHFPMYGKESDPRTYEAIRQRLLEHNNDPKKAFQEPLYKPKKNGEPGPVIRTVKIIDTKNQVIPLNDGKTVAYNSNIVRVDVFEKDGKYYCVPVYTMDIMKGILPNKAIEPNKPYSEWKEMTEDYTFRFSLYPNDLIRIELPREKTVKTAAGEEINVKDVFVYYKTIDSANGGLELISHDHRFSLRGVGSRTLKRFEKYQVDVLGNIYKVRGEKRVGLASSAHSKPGKTIRPLQSTRD

SEQ ID NO: 8350 - protein, 1378 aa, synthetic construct
MDKKYSIGLDIGTNSVGWAVITDEYKVPSKKFKVLGNTDRHSIKKNLIGALLFDSGETAEATRLKRTARRRYTRRKNRICYLQEIFSNEMAKVDDSFFHRLEESFLVEEDKKHERHPIFGNIVDEVAYHEKYPTIYHLRKKLVDSTDKADLRLIYLALAHMIKFRGHFLIEGDLNPDNSDVDKLFIQLVQTYNQLFEENPINASGVDAKAILSARLSKSRKLENLIAQLPGEKKNGLFGNLIALSLGLTPNFKSNFDLAEDAKLQLSKDTYDDDLDNLLAQIGDQYADLFLAAKNLSDAILLSDILRVNTEITKAPLSASMIKRYDEHHQDLTLLKALVRQQLPEKYKEIFFDQSKNGYAGYIDGGASQEEFYKFIKPILEKMDGTEELLVKLKREDLLRKQRTFDNGSIPHQIHLGELHAILRRQEDFYPFLKDNREKIEKILTFRIPYYVGPLARGNSRFAWMTRKSEETITPWNFEEVVDKGASAQSFIERMTNFDKNLPNEKVLPKHSLLYEYFTVYNELTKVKYVTEGMRKPAFLSGEQKKAIVDLLFKTNRKVTVKQLKEDYFKKIECFDSVEISGVEDRFNASLGTYHDLLKIIKDKDFLDNEENEDILEDIVLTLTLFEDREMIEERLKTYAHLFDDKVMKQLKRRRYTGWGRLSRKLINGIRDKQSGKTILDFLKSDGFANRNFMQLIHDDSLTFKEDIQKAQVSGQGDSLHEHIANLAGSPAIKKGILQTVKVVDELVKVMGRHKPENIVIEMARENQTTQKGQKNSRERMKRIEEGIKELGSQILKEHPVENTQLQNEKLYLYYLQNGRDMYVDQELDINRLSDYDVDHIVPQSFLKDDSIDNKVLTRSDKNRGKSDNVPSEEVVKKMKNYWRQLLNAKLITQRKFDNLTKAERGGLSELDKAGFIKRQLVETRQITKHVAQILDSRMNTKYDENDKLIREVKVITLKSKLVSDFRKDFQFYKVREINNYHHAHDAYLNAVVGTALIKKYPKLESEFVYGDYKVYDVRKMIAKSEQEIGKATAKYFFYSNIMNFFKTEITLANGEIRKRPLIETNGETGEIVWDKGRDFATVRKVLSMPQVNIVKKTEIQTVGQNGGLFDDNPKSPLEVTPSKLVPLKKELNPKKYGGYQKPTTAYPVLLITDTKQLIPISVMNKKQFEQNPVKFLRDRGYQQVGKNDFIKLPKYTLVDIGDGIKRLWASSKEIHKGNQLVVSKKSQILLYHAHHLDSDLSNDYLQNHNQQFDVLFNEIISFSKKCKLGKEHIQKIENVYSNKKNSASIEELAESFIKLLGFTQLGATSPFNFLGVKLNQKQYKGKKDYILPCTEGTLIRQSITGLYETRVDLSKIGEDSGGSGGSKRTADGSEFES

SEQ ID NO: 8351 - protein, 1082 aa, synthetic construct
MAAFKPNSINYILGLDIGIASVGWAMVEIDEEENPIRLIDLGVRVFERAEVPKTGDSLAMARRLARSVRRLTRRRAHRLLRTRRLLKREGVLQAANFDENGLIKSLPNTPWQLRAAALDRKLTPLEWSAVLLHLIKHRGYLSQRKNEGETADKELGALLKGVAGNAHALQTGDFRTPAELALNKFEKESGHIRNQRSDYSHTFSRKDLQAELILLFEKQKEFGNPHVSGGLKEGIETLLMTQRPALSGDAVQKMLGHCTFEPAEPKAAKNTYTAERFIWLTKLNNLRILEQGSERPLTDTERATLMDEPYRKSKLTYAQARKLLGLEDTAFFKGLRYGKDNAEASTLMEMKAYHAISRALEKEGLKDKKSPLNLSPELQDEIGTAFSLFKTDEDITGRLKDRIQPEILEALLKHISFDKFVQISLKALRRIVPLMEQGKRYDEACAEIYGDHYGKKNTEEKIYLPPIPADEIRNPVVLRALSQARKVINGVVRRYGSPARIHIETAREVGKSFKDRKEIEKRQEENRKDREKAAAKFREYFPNFVGEPKSKDILKLRLYEQQHGKCLYSGKEINLGRLNEKGYVEIDHALPFSRTWDDSFNNKVLVLGSENQNKGNQTPYEYFNGKDNSREWQEFKARVETSRFPRSKKQRILLQKFDEDGFKERNLNDTRYVNRFLCQFVADRMRLTGKGKKRVFASNGQITNLLRGFWGLRKVRAENDRHHALDAVVVACSTVAMQQKITRFVRYKEMNAFDGKTIDKETGEVLHQKTHFPQPWEFFAQEVMIRVFGKPDGKPEFEEADTLEKLRTLLAEKLSSRPEAVHEYVTPLFVSRAPNRKMSGQGHMETVKSAKRLDEGVSVLRVPLTQLKLKDLEKMVNREREPKLYEALKARLEAHKDDPAKAFAEPFYKYDKAGNRTQQVKAVRVEQVQKTGVWVRNHNGIADNATMVRVDVFEKGDKYYLVPIYSWQVAKGILPDRAVVQGKDEEDWQLIDDSFNFKFSLHPNDLVEVITKKARMFGYFASCHRGTGNINIRIHDLDHKIGKNGILEGIGVKTALSFQKYQIDELGKEIRPCRLKKRPPVR

SEQ ID NO: 8352 - protein, 1375 aa, synthetic construct
MEKKYSIGLDIGTNSVGWAVITDDYKVPSKKFKVLGNTNRKSIKKNLMGALLFDSGETAEATRLKRTARRRYTRRKNRIRYLQEIFANEMAKLDDSFFQRLEESFLVEEDKKNERHPIFGNLADEVAYHRNYPTIYHLRKKLADSPEKADLRLIYLALAHIIKFRGHFLIEGKLNAENSDVAKLFYQLIQTYNQLFEESPLDEIEVDAKGILSARLSKSKRLEKLIAVFPNEKKNGLFGNIIALALGLTPNFKSNFDLTEDAKLQLSKDTYDDDLDELLGQIGDQYADLFSAAKNLSDAILLSDILRSNSEVTKAPLSASMVKRYDEHHQDLALLKTLVRQQFPEKYAEIFKDDTKNGYAGYVGIGIKHRKRTTKLATQEEFYKFIKPILEKMDGAEELLAKLNRDDLLRKQRTFDNGSIPHQIHLKELHAILRRQEEFYPFLKENREKIEKILTFRIPYYVGPLARGNSRFAWLTRKSEEAITPWNFEEVVDKGASAQSFIERMTNFDEQLPNKKVLPKHSLLYEYFTVYNELTKVKYVTERMRKPEFLSGEQKKAIVDLLFKTNRKVTVKQLKEDYFKKIECFDSVEIIGVEDRFNASLGTYHDLLKIIKDKDFLDNEENEDILEDIVLTLTLFEDREMIEERLKTYAHLFDDKVMKQLKRRHYTGWGRLSRKMINGIRDKQSGKTILDFLKSDGFSNRNFMQLIHDDSLTFKEEIEKAQVSGQGDSLHEQIADLAGSPAIKKGILQTVKIVDELVKVMGHKPENIVIEMARENQTTTKGLQQSRERKKRIEEGIKELESQILKENPVENTQLQNEKLYLYYLQNGRDMYVDQELDINRLSDYDVDHIVPQSFIKDDSIDNKVLTRSVENRGKSDNVPSEEVVKKMKNYWRQLLNAKLITQRKFDNLTKAERGGLSEADKAGFIKRQLVETRQITKHVARILDSRMNTKRDKNDKPIREVKVITLKSKLVSDFRKDFQLYKVRDINNYHHAHDAYLNAVVGTALIKKYPKLESEFVYGDYKVYDVRKMIAKSEQEIGKATAKRFFYSNIMNFFKTEVKLANGEIRKRPLIETNGETGEVVWNKEKDFATVRKVLAMPQVNIVKKTEVQTGGFSKESILSKRESAKLIPRKKGWDTRKYGGFGSPTVAYSILVVAKVEKGKAKKLKSVKVLVGITIMEKGSYEKDPIGFLEAKGYKDIKKELIFKLPKYSLFELENGRRRMLASATELQKANELVLPQHLVRLLYYTQNISATTGSNNLGYIEQHREEFKEIFEKIIDFSEKYILKNKVNSNLKSSFDEQFAVSDSILLSNSFVSLLKYTSFGASGGFTFLDLDVKQGRLRYQTVTEVLDATLIYQSITGLYETRTDLSQLGGD

SEQ ID NO: 8353 - protein, 1375 aa, synthetic construct
MEKKYSIGLDIGTNSVGWAVITDDYKVPSKKFKVLGNTNRKSIKKNLMGALLFDSGETAEATRLKRTARRRYTRRKNRIRYLQEIFANEMAKLDDSFFQRLEESFLVEEDKKNERHPIFGNLADEVAYHRNYPTIYHLRKKLADSPEKADLRLIYLALAHIIKFRGHFLIEGKLNAENSDVAKLFYQLIQTYNQLFEESPLDEIEVDAKGILSARLSKSKRLEKLIAVFPNEKKNGLFGNIIALALGLTPNFKSNFDLTEDAKLQLSKDTYDDDLDELLGQIGDQYADLFSAAKNLSDAILLSDILRSNSEVTKAPLSASMVKRYDEHHQDLALLKTLVRQQFPEKYAEIFKDDTKNGYAGYVGADKKLRKRSGKLATEEEFYKFIKPILEKMDGAEELLAKLNRDDLLRKQRTFDNGSIPHQIHLKELHAILRRQEEFYPFLKENREKIEKILTFRIPYYVGPLARGNSRFAWLTRKSEEAITPWNFEEVVDKGASAQSFIERMTNFDEQLPNKKVLPKHSLLYEYFTVYNELTKVKYVTERMRKPEFLSGEQKKAIVDLLFKTNRKVTVKQLKEDYFKKIECFDSVEIIGVEDRFNASLGTYHDLLKIIKDKDFLDNEENEDILEDIVLTLTLFEDREMIEERLKTYAHLFDDKVMKQLKRRHYTGWGRLSRKMINGIRDKQSGKTILDFLKSDGFSNANFMQLIHDDSLTFKEEIEKAQVSGQGDSLHEQIADLAGSPAIKKGILQTVKIVDELVKVMGHKPENIVIEMARENQTTTKGLQQSRERKKRIEEGIKELESQILKENPVENTQLQNEKLYLYYLQNGRDMYVDQELDINRLSDYDVDHIVPQSFIKDDSIDNKVLTRSVENRGKSDNVPSEEVVKKMKNYWRQLLNAKLITQRKFDNLTKAERGGLSEADKAGFIKRQLVETRQITKHVARILDSRMNTKRDKNDKPIREVKVITLKSKLVSDFRKDFQLYKVRDINNYHHAHDAYLNAVVGTALIKKYPKLESEFVYGDYKVYDVRKMIAKSEQEIGKATAKRFFYSNIMNFFKTEVKLANGEIRKRPLIETNGETGEVVWNKEKDFATVRKVLAMPQVNIVKKTEVQTGGFSKESILSKRESAKLIPRKKGWDTRKYGGFGSPTVAYSILVVAKVEKGKAKKLKSVKVLVGITIMEKGSYEKDPIGFLEAKGYKDIKKELIFKLPKYSLFELENGRRRMLASAKELQKANELVLPQHLVRLLYYTQNISATTGSNNLGYIEQHREEFKEIFEKIIDFSEKYILKNKVNSNLKSSFDEQFAVSDSILLSNSFVSLLKYTSFGASGGFTFLDLDVKQGRLRYQTVTEVLDATLIYQSITGLYETRTDLSQLGGD

SEQ ID NO: 8354 - protein, 1368 aa, synthetic construct
MDKKYSIGLDIGTNSVGWAVITDEYKVPSKKFKVLGNTDRHSIKKNLIGALLFDSGETAEATRLKRTARRRYTRRKNRICYLQEIFSNEMAKVDDSFFHRLEESFLVEEDKKHERHPIFGNIVDEVAYHEKYPTIYHLRKKLVDSTDKADLRLIYLALAHMIKFRGHFLIEGDLNPDNSDVDKLFIQLVQTYNQLFEENPINASGVDAKAILSARLSKSRRLENLIAQLPGEKKNGLFGNLIALSLGLTPNFKSNFDLAEDAKLQLSKDTYDDDLDNLLAQIGDQYADLFLAAKNLSDAILLSDILRVNTEITKAPLSASMVKRYDEHHQDLTLLKALVRQQLPEKYKEIFFDQSKNGYAGYIDGGASQEEFYKFIKPILEKMDGTEELLVKLNREDLLRKQRTFDNGIIPHQIHLGELHAILRRQGDFYPFLKDNREKIEKILTFRIPYYVGPLARGNSRFAWMTRKSEETITPWNFEEVVDKGASAQSFIERMTNFDKNLPNEKVLPKHSLLYEYFTVYNELTKVKYVTEGMRKPAFLSGEQKKAIVDLLFKTNRKVTVKQLKEDYFKKIECFDSVEISGVEDRFNASLGTYHDLLKIIKDKDFLDNEENEDILEDIVLTLTLFEDREMIEERLKTYAHLFDDKVMKQLKRLRYTGWGRLSRKLINGIRDKQSGKTILDFLKSDGFANRNFMQLIHDDSLTFKEDIQKAQVSGQGDSLHEHIANLAGSPAIKKGILQTVKVVDELVKVMGGHKPENIVIEMARENQTTQKGQKNSRERMKRIEEGIKELGSQILKEHPVENTQLQNEKLYLYYLQNGRDMYVDQELDINRLSDYDVDHIVPQSFLKDDSIDNKVLTRSDKNRGKSDNVPSEEVVKKMKNYWRQLLNAKLITQRKFDNLTKAERGGLSELDKAGFIKRQLVETRQITKHVAQILDSRMNTKYDENDKLIREVKVITLKSKLVSDFRKDFQFYKVREINNYHHAHDAYLNAVVGTALIKKYPKLESEFVYGDYKVYDVRKMIAKSEQEIGKATAKYFFYSNIMNFFKTEITLANGEIRKRPLIETNGETGEIVWDKGRDFATVRKVLSMPQVNIVKKTEVQTGGFSKESILPKGNSDKLIARKKDWDPKKYGGFNSPTAAYSVLVVAKVEKGKSKKLKSVKELLGITIMERSSFEKNPIGFLEAKGYKEVKKDLIIKLPKYSLFELENGRKRMLASAGVLHKGNELALPSKYVNFLYLASHYEKLKGSPEDNEQKQLFVEQHKHYLDEIIEQISEFSKRVILADANLDKVLSAYNKHRDKPIREQAENIIHLFTLTNLGVPAAFKYFDTTIDKKRYTSTKEVLDATLIHQSITGLYETRIDLSQLGGD

SEQ ID NO: 8355 - protein, 1368 aa, synthetic construct
MDKKYSIGLDIGTNSVGWAVITDEYKVPSKKFKVLGNTDRHSIKKNLIGALLFDSGETAEATRLKRTARRRYTRRKNRICYLQEIFSNEMAKVDDSFFHRLEESFLVEEDKKHERHPIFGNIVDEVAYHEKYPTIYHLRKKLVDSTDKADLRLIYLALAHMIKFRGHFLIEGDLNPDNSDVDKLFIQLVQTYNQLFEENPINASGVDAKAILSARLSKSRRLENLIAQLPGEKKNGLFGNLIALSLGLTPNFKSNFDLAEDAKLQLSKDTYDDDLDNLLAQIGDQYADLFLAAKNLSDAILLSDILRVNTEITKAPLSASMVKRYDEHHQDLTLLKALVRQQLPEKYKEIFFDQSKNGYAGYIDGGASQEEFYKFIKPILEKMDGTEELLVKLNREDLLRKQRTFDNGIIPHQIHLGELHAILRRQGDFYPFLKDNREKIEKILTFRIPYYVGPLARGNSRFAWMTRKSEETITPWNFEEVVDKGASAQSFIERMTNFDKNLPNEKVLPKHSLLYEYFTVYNELTKVKYVTEGMRKPAFLSGEQKKAIVDLLFKTNRKVTVKQLKEDYFKKIECFDSVEISGVEDRFNASLGTYHDLLKIIKDKDFLDNEENEDILEDIVLTLTLFEDREMIEERLKTYAHLFDDKVMKQLKRLRYTGWGRLSRKLINGIRDKQSGKTILDFLKSDGFANRNFMQLIHDDSLTFKEDIQKAQVSGQGDSLHEHIANLAGSPAIKKGILQTVKVVDELVKVMGGHKPENIVIEMARENQTTQKGQKNSRERMKRIEEGIKELGSQILKEHPVENTQLQNEKLYLYYLQNGRDMYVDQELDINRLSDYDVDHIVPQSFLKDDSIDNKVLTRSDKNRGKSDNVPSEEVVKKMKNYWRQLLNAKLITQRKFDNLTKAERGGLSELDKAGFIKRQLVETRQITKHVAQILDSRMNTKYDENDKLIREVKVITLKSKLVSDFRKDFQFYKVREINNYHHAHDAYLNAVVGTALIKKYPKLESEFVYGDYKVYDVRKMIAKSEQEIGKATAKYFFYSNIMNFFKTEITLANGEIRKRPLIETNGETGEIVWDKGRDFATVRKVLSMPQVNIVKKTEVQTGGFSKESILPKGNSDKLIARKKDWDPKKYGGFNSPTVAYSVLVVAKVEKGKSKKLKSVKELLGITIMERSSFEKNPIGFLEAKGYKEVKKDLIIKLPKYSLFELENGRKRMLASASVLHKGNELALPSKYVNFLYLASHYEKLKGSSEDNKQKQLFVEQHKHYLDEIIEQISEFSKRVILADANLDKVLSAYNKHRDKPIREQAENIIHLFTLTNLGASAAFKYFDTTIGRKLYTSTKEVLDATLIHQSITGLYETRIDLSQLGGD

SEQ ID NO: 8356 - protein, 1368 aa, synthetic construct
MDKKYSIGLDIGTNSVGWAVITDEYKVPSKKFKVLGNTDRHSIKKNLIGALLFDSGETAEATRLKRTARRRYTRRKNRICYLQEIFSNEMAKVDDSFFHRLEESFLVEEDKKHERHPIFGNIVDEVAYHEKYPTIYHLRKKLVDSTDKADLRLIYLALAHMIKFRGHFLIEGDLNPDNSDVDKLFIQLVQTYNQLFEENPINASGVDAKAILSARLSKSRRLENLIAQLPGEKKNGLFGNLIALSLGLTPNFKSNFDLAEDAKLQLSKDTYDDDLDNLLAQIGDQYADLFLAAKNLSDAILLSDILRVNTEITKAPLSASMVKRYDEHHQDLTLLKALVRQQLPEKYKEIFFDQSKNGYAGYIDGGASQEEFYKFIKPILEKMDGTEELLVKLNREDLLRKQRTFDNGIIPHQIHLGELHAILRRQGDFYPFLKDNREKIEKILTFRIPYYVGPLARGNSRFAWMTRKSEETITPWNFEEVVDKGASAQSFIERMTNFDKNLPNEKVLPKHSLLYEYFTVYNELTKVKYVTEGMRKPAFLSGEQKKAIVDLLFKTNRKVTVKQLKEDYFKKIECFDSVEISGVEDRFNASLGTYHDLLKIIKDKDFLDNEENEDILEDIVLTLTLFEDREMIEERLKTYAHLFDDKVMKQLKRLRYTGWGRLSRKLINGIRDKQSGKTILDFLKSDGFANRNFMQLIHDDSLTFKEDIQKAQVSGQGDSLHEHIANLAGSPAIKKGILQTVKVVDELVKVMGGHKPENIVIEMARENQTTQKGQKNSRERMKRIEEGIKELGSQILKEHPVENTQLQNEKLYLYYLQNGRDMYVDQELDINRLSDYDVDHIVPQSFLKDDSIDNKVLTRSDKNRGKSDNVPSEEVVKKMKNYWRQLLNAKLITQRKFDNLTKAERGGLSELDKAGFIKRQLVETRQITKHVAQILDSRMNTKYDENDKLIREVKVITLKSKLVSDFRKDFQFYKVREINNYHHAHDAYLNAVVGTALIKKYPKLESEFVYGDYKVYDVRKMIAKSEQEIGKATAKYFFYSNIMNFFKTEITLANGEIRKRPLIETNGETGEIVWDKGRDFATVRKVLSMPQVNIVKKTEVQTGGFSKESILPKGNSDKLIARKKDWDPKKYGGFNSPTVAYSVLVVAKVEKGKSKKLKSVKELLGITIMERSSFEKNPIDFLEAKGYKEVKKDLIIKLPKYSLFELENGRKRMLASAGVLQKGNELALPSKYVNFLYLASHYEKLKGSPEDNEQKQLFVEQHKHYLDEIIEQISEFSKRVILADANLDKVLSAYNKHRDKPIREQAENIIHLFTLTNLGAPAAFKYFDTTINRKQYNTTKEVLDATLIRQSITGLYETRIDLSQLGGD

SEQ ID NO: 8357 - protein, 1368 aa, synthetic construct [sequence omitted]

SEQ ID NO: 8358 - protein, 1368 aa, synthetic construct
MDKKYSIGLDIGTNSVGWAVITDEYKVPSKKFKVLGNTDRHSIKKNLIGALLFDSGETAEATRLKRTARRRYTRRKNRICYLQEIFSNEMAKVDDSFFHRLEESFLVEEDKKHERHPIFGNIVDEVAYHEKYPTIYHLRKKLVDSTDKADLRLIYLALAHMIKFRGHFLIEGDLNPDNSDVDKLFIQLVQTYNQLFEENPINASGVDAKAILSARLSKSRRLENLIAQLPGEKKNGLFGNLIALSLGLTPNFKSNFDLAEDAKLQLSKDTYDDDLDNLLAQIGDQYADLFLAAKNLSDAILLSDILRVNTEITKAPLSASMIKRYDEHHQDLTLLKALVRQQLPEKYKEIFFDQSKNGYAGYIDGGASQEEFYKFIKPILEKMDGTEELLVKLNREDLLRKQRTFDNGSIPHQIHLGELHAILRRQEDFYPFLKDNREKIEKILTFRIPYYVGPLARGNSRFAWMTRKSEETITPWNFEEVVDKGASAQSFIERMTNFDKNLPNEKVLPKHSLLYEYFTVYNELTKVKYVTEGMRKPAFLSGEQKKAIVDLLFKTNRKVTVKQLKEDYFKKIECFDSVEISGVEDRFNASLGTYHDLLKIIKDKDFLDNEENEDILEDIVLTLTLFEDREMIEERLKTYAHLFDDKVMKQLKRRRYTGWGRLSRKLINGIRDKQSGKTILDFLKSDGFANRNFMQLIHDDSLTFKEDIQKAQVSGQGDSLHEHIANLAGSPAIKKGILQTVKVVDELVKVMGRHKPENIVIEMARENQTTQKGQKNSRERMKRIEEGIKELGSQILKEHPVENTQLQNEKLYLYYLQNGRDMYVDQELDINRLSDYDVDHIVPQSFLKDDSIDNKVLTRSDKNRGKSDNVPSEEVVKKMKNYWRQLLNAKLITQRKFDNLTKAERGGLSELDKAGFIKRQLVETRQITKHVAQILDSRMNTKYDENDKLIREVKVITLKSKLVSDFRKDFQFYKVREINNYHHAHDAYLNAVVGTALIKKYPKLESEFVYGDYKVYDVRKMIAKSEQEIGKATAKYFFYSNIMNFFKTEITLANGEIRKRPLIETNGETGEIVWDKGRDFATVRKVLSMPQVNIVKKTEVQTGGFSKESILPKRNSDKLIARKKDWDPKKYGGFDSPTVAYSVLVVAKVEKGKSKKLKSVKELLGITIMERSSFEKNPIDFLEAKGYKEVKKDLIIKLPKYSLFELENGRKRMLASARELQKGNELALPSKYVNFLYLASHYEKLKGSPEDNEQKQLFVEQHKHYLDEIIEQISEFSKRVILADAQLDKVLSAYNKHRDKPIREQAENIIHLFTLTNLGAPAAFKYFDTTFKQKQYRSTKEVLDATLIHQSITGLYETRIDLSQLGGD

SEQ ID NO: 8359 - protein, 1368 aa, synthetic construct
MDKKYSIGLDIGTNSVGWAVITDEYKVPSKKFKVLGNTDRHSIKKNLIGALLFDSGETAEATRLKRTARRRYTRRKNRICYLQEIFSNEMAKVDDSFFHRLEESFLVEEDKKHERHPIFGNIVDEVAYHEKYPTIYHLRKKLVDSTDKADLRLIYLALAHMIKFRGHFLIEGDLNPDNSDVDKLFIQLVQTYNQLFEENPINASGVDAKAILSARLSKSRRLENLIAQLPGEKKNGLFGNLIALSLGLTPNFKSNFDLAEDAKLQLSKDTYDDDLDNLLAQIGDQYADLFLAAKNLSDAILLSDILRVNTEITKAPLSASMIKRYDEHHQDLTLLKALVRQQLPEKYKEIFFDQSKNGYAGYIDGGASQEEFYKFIKPILEKMDGTEELLVKLNREDLLRKQRTFDNGSIPHQIHLGELHAILRRQEDFYPFLKDNREKIEKILTFRIPYYVGPLARGNSRFAWMTRKSEETITPWNFEEVVDKGASAQSFIERMTNFDKNLPNEKVLPKHSLLYEYFTVYNELTKVKYVTEGMRKPAFLSGEQKKAIVDLLFKTNRKVTVKQLKEDYFKKIECFDSVEISGVEDRFNASLGTYHDLLKIIKDKDFLDNEENEDILEDIVLTLTLFEDREMIEERLKTYAHLFDDKVMKQLKRRRYTGWGRLSRKLINGIRDKQSGKTILDFLKSDGFANRNFMQLIHDDSLTFKEDIQKAQVSGQGDSLHEHIANLAGSPAIKKGILQTVKVVDELVKVMGRHKPENIVIEMARENQTTQKGQKNSRERMKRIEEGIKELGSQILKEHPVENTQLQNEKLYLYYLQNGRDMYVDQELDINRLSDYDVDHIVPQSFLKDDSIDNKVLTRSDKNRGKSDNVPSEEVVKKMKNYWRQLLNAKLITQRKFDNLTKAERGGLSELDKAGFIKRQLVETRQITKHVAQILDSRMNTKYDENDKLIREVKVITLKSKLVSDFRKDFQFYKVREINNYHHAHDAYLNAVVGTALIKKYPKLESEFVYGDYKVYDVRKMIAKSEQEIGKATAKYFFYSNIMNFFKTEITLANGEIRKRPLIETNGETGEIVWDKGRDFATVRKVLSMPQVNIVKKTEVQTGGFSKESILPKRNSDKLIARKKDWDPKKYGGFLWPTVAYSVLVVAKVEKGKSKKLKSVKELLGITIMERSSFEKNPIDFLEAKGYKEVKKDLIIKLPKYSLFELENGRKRMLASAKQLQKGNELALPSKYVNFLYLASHYEKLKGSPEDNEQKQLFVEQHKHYLDEIIEQISEFSKRVILADANLDKVLSAYNKHRDKPIREQAENIIHLFTLTNLGAPAAFKYFDTTIDRKQYRSTKEVLDATLIHQSITGLYETRIDLSQLGGD

SEQ ID NO: 8360 - protein, 1368 aa, synthetic construct
MDKKYSIGLDIGTNSVGWAVITDEYKVPSKKFKVLGNTDRHSIKKNLIGALLFDSGETAEATRLKRTARRRYTRRKNRICYLQEIFSNEMAKVDDSFFHRLEESFLVEEDKKHERHPIFGNIVDEVAYHEKYPTIYHLRKKLVDSTDKADLRLIYLALAHMIKFRGHFLIEGDLNPDNSDVDKLFIQLVQTYNQLFEENPINASGVDAKAILSARLSKSRRLENLIAQLPGEKKNGLFGNLIALSLGLTPNFKSNFDLAEDAKLQLSKDTYDDDLDNLLAQIGDQYADLFLAAKNLSDAILLSDILRVNTEITKAPLSASMIKRYDEHHQDLTLLKALVRQQLPEKYKEIFFDQSKNGYAGYIDGGASQEEFYKFIKPILEKMDGTEELLVKLNREDLLRKQRTFDNGSIPHQIHLGELHAILRRQEDFYPFLKDNREKIEKILTFRIPYYVGPLARGNSRFAWMTRKSEETITPWNFEEVVDKGASAQSFIERMTNFDKNLPNEKVLPKHSLLYEYFTVYNELTKVKYVTEGMRKPAFLSGEQKKAIVDLLFKTNRKVTVKQLKEDYFKKIECFDSVEISGVEDRFNASLGTYHDLLKIIKDKDFLDNEENEDILEDIVLTLTLFEDREMIEERLKTYAHLFDDKVMKQLKRRRYTGWGRLSRKLINGIRDKQSGKTILDFLKSDGFANRNFMQLIHDDSLTFKEDIQKAQVSGQGDSLHEHIANLAGSPAIKKGILQTVKVVDELVKVMGRHKPENIVIEMARENQTTQKGQKNSRERMKRIEEGIKELGSQILKEHPVENTQLQNEKLYLYYLQNGRDMYVDQELDINRLSDYDVDHIVPQSFLKDDSIDNKVLTRSDKNRGKSDNVPSEEVVKKMKNYWRQLLNAKLITQRKFDNLTKAERGGLSELDKAGFIKRQLVETRQITKHVAQILDSRMNTKYDENDKLIREVKVITLKSKLVSDFRKDFQFYKVREINNYHHAHDAYLNAVVGTALIKKYPKLESEFVYGDYKVYDVRKMIAKSEQEIGKATAKYFFYSNIMNFFKTEITLANGEIRKRPLIETNGETGEIVWDKGRDFATVRKVLSMPQVNIVKKTEVQTGGFSKESILPKRNSDKLIARKKDWDPKKYGGFVSPTVAYSVLVVAKVEKGKSKKLKSVKELLGITIMERSSFEKNPIDFLEAKGYKEVKKDLIIKLPKYSLFELENGRKRMLASAGELQKGNELALPSKYVNFLYLASHYEKLKGSPEDNEQKQLFVEQHKHYLDEIIEQISEFSKRVILADANLDKVLSAYNKHRDKPIREQAENIIHLFTLTNLGAPAAFKYFDTTIDRKQYRSTKEVLDATLIHQSITGLYETRIDLSQLGGD

SEQ ID NO: 8361 - protein, 1368 aa, synthetic construct
MDKKYSIGLDIGTNSVGWAVITDEYKVPSKKFKVLGNTDRHSIKKNLIGALLFDSGETAEATRLKRTARRRYTRRKNRICYLQEIFSNEMAKVDDSFFHRLEESFLVEEDKKHERHPIFGNIVDEVAYHEKYPTIYHLRKKLVDSTDKADLRLIYLALAHMIKFRGHFLIEGDLNPDNSDVDKLFIQLVQTYNQLFEENPINASGVDAKAILSARLSKSRRLENLIAQLPGEKKNGLFGNLIALSLGLTPNFKSNFDLAEDAKLQLSKDTYDDDLDNLLAQIGDQYADLFLAAKNLSDAILLSDILRVNTEITKAPLSASMIKRYDEHHQDLTLLKALVRQQLPEKYKEIFFDQSKNGYAGYIDGGASQEEFYKFIKPILEKMDGTEELLVKLNREDLLRKQRTFDNGSIPHQIHLGELHAILRRQEDFYPFLKDNREKIEKILTFRIPYYVGPLARGNSRFAWMTRKSEETITPWNFEEVVDKGASAQSFIERMTNFDKNLPNEKVLPKHSLLYEYFTVYNELTKVKYVTEGMRKPAFLSGEQKKAIVDLLFKTNRKVTVKQLKEDYFKKIECFDSVEISGVEDRFNASLGTYHDLLKIIKDKDFLDNEENEDILEDIVLTLTLFEDREMIEERLKTYAHLFDDKVMKQLKRRRYTGWGRLSRKLINGIRDKQSGKTILDFLKSDGFANRNFMQLIHDDSLTFKEDIQKAQVSGQGDSLHEHIANLAGSPAIKKGILQTVKVVDELVKVMGRHKPENIVIEMARENQTTQKGQKNSRERMKRIEEGIKELGSQILKEHPVENTQLQNEKLYLYYLQNGRDMYVDQELDINRLSDYDVDHIVPQSFLKDDSIDNKVLTRSDKNRGKSDNVPSEEVVKKMKNYWRQLLNAKLITQRKFDNLTKAERGGLSELDKAGFIKRQLVETRQITKHVAQILDSRMNTKYDENDKLIREVKVITLKSKLVSDFRKDFQFYKVREINNYHHAHDAYLNAVVGTALIKKYPKLESEFVYGDYKVYDVRKMIAKSEQEIGKATAKYFFYSNIMNFFKTEITLANGEIRKRPLIETNGETGEIVWDKGRDFATVRKVLSMPQVNIVKKTEVQTGGFSKESILPKRNSDKLIARKKDWDPKKYGGFVSPTVAYSVLVVAKVEKGKSKKLKSVKELLGITIMERSSFEKNPIDFLEAKGYKEVKKDLIIKLPKYSLFELENGRKRMLASARELQKGNELALPSKYVNFLYLASHYEKLKGSPEDNEQKQLFVEQHKHYLDEIIEQISEFSKRVILADANLDKVLSAYNKHRDKPIREQAENIIHLFTLTNLGAPAAFKYFDTTIDRKEYRSTKEVLDATLIHQSITGLYETRIDLSQLGGD

SEQ ID NO: 8362 - protein, 1368 aa, synthetic construct
MDKKYSIGLDIGTNSVGWAVITDEYKVPSKKFKVLGNTDRHSIKKNLIGALLFDSGETAEATRLKRTARRRYTRRKNRICYLQEIFSNEMAKVDDSFFHRLEESFLVEEDKKHERHPIFGNIVDEVAYHEKYPTIYHLRKKLVDSTDKADLRLIYLALAHMIKFRGHFLIEGDLNPDNSDVDKLFIQLVQTYNQLFEENPINASGVDAKAILSARLSKSRRLENLIAQLPGEKKNGLFGNLIALSLGLTPNFKSNFDLAEDTKLQLSKDTYDDDLDNLLAQIGDQYADLFLAAKNLSDAILLSDILRVNTEITKAPLSASMIKLYDEHHQDLTLLKALVRQQLPEKYKEIFFDQSKNGYAGYIDGGASQEEFYKFIKPILEKMDGTEELLVKLNREDLLRKQRTFDNGIIPHQIHLGELHAILRRQEDFYPFLKDNREKIEKILTFRIPYYVGPLARGNSRFAWMTRKSEETITPWNFEKVVDKGASAQSFIERMTNFDKNLPNEKVLPKHSLLYEYFTVYNELTKVKYVTEGMRKPAFLSGDQKKAIVDLLFKTNRKVTVKQLKEDYFKKIECFDSVEISGVEDRFNASLGTYHDLLKIIKDKDFLDNEENEDILEDIVLTLTLFEDREMIEERLKTYAHLFDDKVMKQLKRRRYTGWGRLSRKLINGIRDKQSGKTILDFLKSDGFANRNFIQLIHDDSLTFKEDIQKAQVSGQGDSLHEHIANLAGSPAIKKGILQTVKVVDELVKVMGRHKPENIVIEMARENQTTQKGQKNSRERMKRIEEGIKELGSQILKEHPVENTQLQNEKLYLYYLQNGRDMYVDQELDINRLSDYDVDHIVPQSFLKDDSIDNKVLTRSDKNRGKSDNVPSEEVVKKMKNYWRQLLNAKLITQRKFDNLTKAERGGLSELDKAGFIKRQLVETRQITKHVAQILDSRMNTKYDENDKLIREVKVITLKSKLVSDFRKDFQFYKVREINNYHHAHDAYLNAVVGTALIKKYPKLESEFVYGDYKVYDVRKMIAKSEQEIGKATAKYFFYSNIMNFFKTEITLANGEIRKRPLIETNGETGEIVWDKGRDFATVRKVLSMPQVNIVKKTEVQTGGFSKESILPKRNSDKLIARKKDWDPKKYGGFDSPTVAYSVLVVAKVEKGKSKKLKSVKELLGITIMERSSFEKNPIDFLEAKGYKEVKKDLIIKLPKYSLFELENGRKRMLASAGVLQKGNELALPSKYVNFLYLASHYEKLKGSPEDNEQKQLFVEQHKHYLDEIIEQISEFSKRVILADANLDKVLSAYNKHRDKPIREQAENIIHLFTLTNLGAPAAFKYFDTTIDRKRYTSTKEVLDATLIHQSITGLYETRIDLSQLGGD

SEQ ID NO: 8363 - protein, 1368 aa, synthetic construct
MDKKYSIGLDIGTNSVGWAVITDEYKVPSKKFKVLGNTDRHSIKKNLIGALLFDSGETAEATRLKRTARRRYTRRKNRICYLQEIFSNEMAKVDDSFFHRLEESFLVEEDKKHERHPIFGNIVDEVAYHEKYPTIYHLRKKLVDSTDKADLRLIYLALAHMIKFRGHFLIEGDLNPDNSDVDKLFIQLVQTYNQLFEENPINASGVDAKAILSARLSKSRRLENLIAQLPGEKKNGLFGNLIALSLGLTPNFKSNFDLAEDTKLQLSKDTYDDDLDNLLAQIGDQYADLFLAAKNLSDAILLSDILRVNTEITKAPLSASMIKLYDEHHQDLTLLKALVRQQLPEKYKEIFFDQSKNGYAGYIDGGASQEEFYKFIKPILEKMDGTEELLVKLNREDLLRKQRTFDNGIIPHQIHLGELHAILRRQEDFYPFLKDNREKIEKILTFRIPYYVGPLARGNSRFAWMTRKSEETITPWNFEKVVDKGASAQSFIERMTNFDKNLPNEKVLPKHSLLYEYFTVYNELTKVKYVTEGMRKPAFLSGDQKKAIVDLLFKTNRKVTVKQLKEDYFKKIECFDSVEISGVEDRFNASLGTYHDLLKIIKDKDFLDNEENEDILEDIVLTLTLFEDREMIEERLKTYAHLFDDKVMKQLKRRRYTGWGRLSRKLINGIRDKQSGKTILDFLKSDGFANRNFIQLIHDDSLTFKEDIQKAQVSGQGDSLHEHIANLAGSPAIKKGILQTVKVVDELVKVMGRHKPENIVIEMARENQTTQKGQKNSRERMKRIEEGIKELGSQILKEHPVENTQLQNEKLYLYYLQNGRDMYVDQELDINRLSDYDVDHIVPQSFLKDDSIDNKVLTRSDKNRGKSDNVPSEEVVKKMKNYWRQLLNAKLITQRKFDNLTKAERGGLSELDKAGFIKRQLVETRQITKHVAQILDSRMNTKYDENDKLIREVKVITLKSKLVSDFRKDFQFYKVREINNYHHAHDAYLNAVVGTALIKKYPKLESEFVYGDYKVYDVRKMIAKSEQEIGKATAKYFFYSNIMNFFKTEITLANGEIRKRPLIETNGETGEIVWDKGRDFATVRKVLSMPQVNIVKKTEVQTGGFSKESIRPKRNSDKLIARKKDWDPKKYGGFVSPTVAYSVLVVAKVEKGKSKKLKSVKELLGITIMERSSFEKNPIDFLEAKGYKEVKKDLIIKLPKYSLFELENGRKRMLASARFLQKGNELALPSKYVNFLYLASHYEKLKGSPEDNEQKQLFVEQHKHYLDEIIEQISEFSKRVILADANLDKVLSAYNKHRDKPIREQAENIIHLFTLTNLGAPRAFKYFDTTIDRKVYRSTKEVLDATLIHQSITGLYETRIDLSQLGGD

SEQ ID NO: 8364 - protein, 1122 aa, synthetic construct
MSDLVLGLDIGIGSVGVGILNKVTGEIIHKNSRIFPAAQAENNLVRRTNRQGRRLARRKKHRRVRLNRLFEESGLITDFTKISINLNPYQLRVKGLTDELSNEELFIALKNMVKHRGISYLDDASDDGNSSVGDYAQIVKENSKQLETKTPGQIQLERYQTYGQLRGDFTVEKDGKKHRLINVFPTSAYRSEALRILQTQQEFNPQITDEFINRYLEILTGKRKYYHGPGNEKSRTDYGRYRTSGETLDNIFGILIGKCTFYPDEFRAAKASYTAQEFNLLNDLNNLTVPTETKKLSKEQKNQIINYVKNEKAMGPAKLFKYIAKLLSCDVADIKGYRIDKSGKAEIHTFEAYRKMKTLETLDIEQMDRETLDKLAYVLTLNTEREGIQEALEHEFADGSFSQKQVDELVQFRKANSSIFGKGWHNFSVKLMMELIPELYETSEEQMTILTRLGKQKTTSSSNKTKYIDEKLLTEEIYNPVVAKSVRQAIKIVNAAIKEYGDFDNIVIEMARETNEDDEKKAIQKIQKANKDEKDAAMLKAANQYNGKAELPHSVFHGHKQLATKIRLWHQQGERCLYTGKTISIHDLINNSNQFEVDHILPLSITFDDSLANKVLVYATANQEKGQRTPYQALDSMDDAWSFRELKAFVRESKTLSNKKKEYLLTEEDISKFDVRKKFIERNLVDTRYASRVVLNALQEHFRAHKIDTKVSVVRGQFTSQLRRHWGIEKTRDTYHHHAVDALIIAASSQLNLWKKQKNTLVSYSEEQLLDIETGELISDDEYKESVFKAPYQHFVDTLKSKEFEDSILFSYQVDSKFNRKISDATIYATRQAKVGKDKKDETYVLGKIKDIYTQDGYDAFMKIYKKDKSKFLMYRHDPQTFEKVIEPILENYPNKQMNEKGKEVPCNPFLKYKEEHGYIRKYSKKGNGPEIKSLKYYDSKLLGNPIDITPENSKNKVVLQSLKPWRTDVYFNKATGKYEILGLKYADLQFEKGTGTYKISQEKYNDIKKKEGVDSDSEFKFTLYKNDLLLVKDTETKEQQLFRFLSRTLPKQKHYVELKPYDKQKFEGGEALIKVLGNVANGGQCIKGLAKSNISIYKVRTDVLGNQHIIKNEGDKPKLDF

SEQ ID NO: 8365 - protein, 1122 aa, synthetic construct
MSDLVLGLDIGIGSVGVGILNKVTGEIIHKNSRIFPAAQAENNLVRRTNRQGRRLARRKKHRRVRLNRLFEESGLITDFTKISINLNPYQLRVKGLTDELSNEELFIALKNMVKHRGISYLDDASDDGNSSVGDYAQIVKENSKQLETKTPGQIQLERYQTYGQLRGDFTVEKDGKKHRLINVFPTSAYRSEALRILQTQQEFNPQITDEFINRYLEILTGKRKYYHGPGNEKSRTDYGRYRTSGETLDNIFGILIGKCTFYPDEFRAAKASYTAQEFNLLNDLNNLTVPTETKKLSKEQKNQIINYVKNEKAMGPAKLFKYIAKLLSCDVADIKGYRIDKSGKAEIHTFEAYRKMKTLETLDIEQMDRETLDKLAYVLTLNTEREGIQEALEHEFADGSFSQKQVDELVQFRKANSSIFGKGWHNFSVKLMMELIPELYETSEEQMTILTRLGKQKTTSSSNKTKYIDEKLLTEEIYNPVVAKSVRQAIKIVNAAIKEYGDFDNIVIEMARETNEDDEKKAIQKIQKANKDEKDAAMLKAANQYNGKAELPHSVFHGHKQLATKIRLWHQQGERCLYTGKTISIHDLINNSNQFEVDHILPLSITFDDSLANKVLVYATANQEKGQRTPYQALDSMDDAWSFRELKAFVRESKTLSNKKKEYLLTEEDISKFDVRKKFIERNLVDTRYASRVVLNALQEHFRAHKIDTKVSVVRGQFTSQLRRHWGIEKTRDTYHHHAVDALIIAASSQLNLWKKQKNTLVSYSEEQLLDIETGELISDDEYKESVFKAPYQHFVDTLKSKEFEDSILFSYQVDSKFNRKISDATIYATRQAKVGKDKKDETYVLGKIKDIYTQDGYDAFMKIYKKDKSKFLMYRHDPQTFEKVIEPILENYPNKQMNEKGKEVPCNPFLKYKEEHGYIRKYSKKGNGPEIKSLKYYDSKLLGNPIDITPENSKNKVVLQSLKPWRTDVYFNKNTGKYEILGLKYADLQFEKKTGTYKISQEKYNGIMKEEGVDSDSEFKFTLYKNDLLLVKDTETKEQQLFRFLSRTMPNVKYYVELKPYSKDKFEKNESLIEILGSADKSGRCIKGLGKSNISIYKVRTDVLGNQHIIKNEGDKPKLDF

SEQ ID NO: 8366 - protein, 1120 aa, synthetic construct
MSDLVLGLDIGIGSVGVGILNKVTGEIIHKNSRIFPAAQAENNLVRRTNRQGRRLARRKKHRRVRLNRLFEESGLITDFTKISINLNPYQLRVKGLTDELSNEELFIALKNMVKHRGISYLDDASDDGNSSVGDYAQIVKENSKQLETKTPGQIQLERYQTYGQLRGDFTVEKDGKKHRLINVFPTSAYRSEALRILQTQQEFNPQITDEFINRYLEILTGKRKYYHGPGNEKSRTDYGRYRTSGETLDNIFGILIGKCTFYPDEFRAAKASYTAQEFNLLNDLNNLTVPTETKKLSKEQKNQIINYVKNEKAMGPAKLFKYIAKLLSCDVADIKGYRIDKSGKAEIHTFEAYRKMKTLETLDIEQMDRETLDKLAYVLTLNTEREGIQEALEHEFADGSFSQKQVDELVQFRKANSSIFGKGWHNFSVKLMMELIPELYETSEEQMTILTRLGKQKTTSSSNKTKYIDEKLLTEEIYNPVVAKSVRQAIKIVNAAIKEYGDFDNIVIEMARETNEDDEKKAIQKIQKANKDEKDAAMLKAANQYNGKAELPHSVFHGHKQLATKIRLWHQQGERCLYTGKTISIHDLINNSNQFEVDHILPLSITFDDSLANKVLVYATANQEKGQRTPYQALDSMDDAWSFRELKAFVRESKTLSNKKKEYLLTEEDISKFDVRKKFIERNLVDTRYASRVVLNALQEHFRAHKIDTKVSVVRGQFTSQLRRHWGIEKTRDTYHHHAVDALIIAASSQLNLWKKQKNTLVSYSEDQLLDIETGELISDDEYKESVFKAPYQHFVDTLKSKEFEDSILFSYQVDSKFNRKISDATIYATRQAKVGKDKADETYVLGKIKDIYTQDGYDAFMKIYKKDKSKFLMYRHDPQTFEKVIEPILENYPNKQINEKGKEVPCNPFLKYKEEHGYIRKYSKKGNGPEIKSLKYYDSKLGNHIDITPKDSNNKVVLQSLKPWRTDVYFNKNTGKYEILGLKYSDMQFEKGTGKYSISKEQYENIKVREGVDENSEFKFTLYKNDLLLLKDSENGEQILLRFTSRNDTSKHYVELKPYNRQKFEGSEYLIKSLGTVAKGGQCIKGLGKSNISIYKVRTDVLGNQHIIKNEGDKPKLDF

SEQ ID NO: 8367 - protein, 1120 aa, synthetic construct
MSDLVLGLDIGIGSVGVGILNKVTGEIIHKNSRIFPAAQAENNLVRRTNRQGRRLARRKKHRRVRLNRLFEESGLITDFTKISINLNPYQLRVKGLTDELSNEELFIALKNMVKHRGISYLDDASDDGNSSVGDYAQIVKENSKQLETKTPGQIQLERYQTYGQLRGDFTVEKDGKKHRLINVFPTSAYRSEALRILQTQQEFNPQITDEFINRYLEILTGKRKYYHGPGNEKSRTDYGRYRTSGETLDNIFGILIGKCTFYPDEFRAAKASYTAQEFNLLNDLNNLTVPTETKKLSKEQKNQIINYVKNEKAMGPAKLFKYIAKLLSCDVADIKGYRIDKSGKAEIHTFEAYRKMKTLETLDIEQMDRETLDKLAYVLTLNTEREGIQEALEHEFADGSFSQKQVDELVQFRKANSSIFGKGWHNFSVKLMMELIPELYETSEEQMTILTRLGKQKTTSSSNKTKYIDEKLLTEEIYNPVVAKSVRQAIKIVNAAIKEYGDFDNIVIEMARETNEDDEKKAIQKIQKANKDEKDAAMLKAANQYNGKAELPHSVFHGHKQLATKIRLWHQQGERCLYTGKTISIHDLINNSNQFEVDHILPLSITFDDSLANKVLVYATANQEKGQRTPYQALDSMDDAWSFRELKAFVRESKTLSNKKKEYLLTEEDISKFDVRKKFIERNLVDTRYASRVVLNALQEHFRAHKIDTKVSVVRGQFTSQLRRHWGIEKTRDTYHHHAVDALIIAASSQLNLWKKQKNTLVSYSEDQLLDIETGELISDDEYKESVFKAPYQHFVDTLKSKEFEDSILFSYQVDSKFNRKISDATIYATRQAKVGKDKADETYVLGKIKDIYTQDGYDAFMKIYKKDKSKFLMYRHDPQTFEKVIEPILENYPNKQINEKGKEVPCNPFLKYKEEHGYIRKYSKKGNGPEIKSLKYYDSKLGNHIDITPKDSNNKVVLQSLKPWRTDVYFNKNTGKYEILGLKYSDMQFEKGTGKYSISKEQYENIKVREGVDENSEFKFTLYKNDLLLLKDSENGEQILLRFTSRNDTSKHYVELKPYNRQKFEGSEYLIKSLGTVVKGGRCIKGLGKSNISIYKVRTDVLGNQHIIKNEGDKPKLDF

SEQ ID NO: 8368 - protein, 1057 aa, synthetic construct
MNQKFILGLDIGITSVGYGLIDYETKNIIDAGVRLFPEANVENNEGRRSKRGSRRLKRRRIHRLERVKLLLTEYDLINKEQIPTSNNPYQIRVKGLSEILSKDELAIALLHLAKRRGIHNVDVAADKEETASDSLSTKDQINKNAKFLESRYVCELQKERLENEGHVRGVENRFLTKDIVREAKKIIDTQMQYYPEIDETFKEKYISLVETRREYFEGPGQGSPFGWNGDLKKWYEMLMGHCTYFPQELRSVKYAYSADLFNALNDLNNLIIQRDNSEKLEYHEKYHIIENVFKQKKKPTLKQIAKEIGVNPEDIKGYRITKSGTPEFTSFKLFHDLKKVVKDHAILDDIDLLNQIAEILTIYQDKDSIVAELGQLEYLMSEADKQSISELTGYTGTHSLSLKCMNMIIDELWHSSMNQMEVFTYLNMRPKKYELKGYQRIPTDMIDDAILSPVVKRTFIQSINVINKVIEKYGIPEDIIIELARENNSDDRKKFINNLQKKNEATRKRINEIIGQTGNQNAKRIVEKIRLHDQQEGKCLYSLESIPLEDLLNNPNHYEVDHIIPRSVSFDNSYHNKVLVKQSENSKKSNLTPYQYFNSGKSKLSYNQFKQHILNLSKSQDRISKKKKEYLLEERDINKFEVQKEFINRNLVDTRYATRELTNYLKAYFSANNMNVKVKTINGSFTDYLRKVWKFKKERNHGYKHHAEDALIIANADFLFKENKKLKAVNSVLEKPEIETKQLDIQVDSEDNYSEMFIIPKQVQDIKDFRNFKYSHRVDKKPNRQLINDTLYSTRKKDNSTYIVQTIKDIYAKDNTTLKKQFDKSPEKFLMYQHDPRTFEKLEVIMKQYANEKNPLAKYHEETGEYLTKYSKKNNGPIVKSLKYIGNKLGSHLDVTHQFKSSTKKLVKLSIKNYRFDVYLTEKGYKFVTIAYLNVFKKDNYYYIPKDKYQELKEKKKIKDTDQFIASFYKNDLIKLNGDLYKIIGVNSDDRNIIELDYYDIKYKDYCEINNIKGEPRIKKTIGKKTESIEKFTTDVLGNLYLHSTEKAPQLIFKRGL

SEQ ID NO: 8369 - protein, 1057 aa, synthetic construct
MNQKFILGLDIGITSVGYGLIDYETKNIIDAGVRLFPEANVENNEGRRSKRGSRRLKRRRIHRLERVKLLLTEYDLINKEQIPTSNNPYQIRVKGLSEILSKDELAIALLHLAKRRGIHNVDVAADKEETASDSLSTKDQINKNAKFLESRYVCELQKERLENEGHVRGVENRFLTKDIVREAKKIIDTQMQYYPEIDETFKEKYISLVETRREYFEGPGQGSPFGWNGDLKKWYEMLMGHCTYFPQELRSVKYAYSADLFNALNDLNNLIIQRDNSEKLEYHEKYHIIENVFKQKKKPTLKQIAKEIGVNPEDIKGYRITKSGTPEFTSFKLFHDLKKVVKDHAILDDIDLLNQIAEILTIYQDKDSIVAELGQLEYLMSEADKQSISELTGYTGTHSLSLKCMNMIIDELWHSSMNQMEVFTYLNMRPKKYELKGYQRIPTDMIDDAILSPVVKRTFIQSINVINKVIEKYGIPEDIIIELARENNSDDRKKFINNLQKKNEATRKRINEIIGQTGNQNAKRIVEKIRLHDQQEGKCLYSLESIPLEDLLNNPNHYEVDHIIPRSVSFDNSYHNKVLVKQSENSKKSNLTPYQYFNSGKSKLSYNQFKQHILNLSKSQDRISKKKKEYLLEERDINKFEVQKEFINRNLVDTRYATRELTSYLKAYFSANNMDVKVKTINGSFTNHLRKVWRFDKYRNHGYKHHAEDALIIANADFLFKENKKLQNTNKILEKPTIENNTKKVTVEKEEDYNNVFETPKLVEDIKQYRDYKFSHRVDKKPNRQLINDTLYSTRMKDEHDYIVQTITDIYGKDNTNLKKQFNKNPEKFLMYQNDPKTFEKLSIIMKQYSDEKNPLAKYYEETGEYLTKYSKKNNGPIVKKIKLLGNKVGNHLDVTNKYENSTKKLVKLSIKNYRFDVYLTEKGYKFVTIAYLNVFKKDNYYYIPKDKYQELKEKKKIKDTDQFIASFYKNDLIKLNGDLYKIIGVNSDDRNIIELDYYDIKYKDYCEINNIKGEPRIKKTIGKKTESIEKFTTDVLGNLYLHSTEKAPQLIFKRGL

SEQ ID NO: 8370 - protein, 677 aa, synthetic construct
TLNIEDEYRLHETSKEPDVSLGSTWLSDFPQAWAETGGMGLAVRQAPLIIPLKATSTPVSIKQYPMSQEARLGIKPHIQRLLDQGILVPCQSPWNTPLLPVKKPGTNDYRPVQDLREVNKRVEDIHPTVPNPYNLLSGLPPSHQWYTVLDLKDAFFCLRLHPTSQPLFAFEWRDPEMGISGQLTWTRLPQGFKNSPTLFNEALHRDLADFRIQHPDLILLQYVDDLLLAATSELDCQQGTRALLQTLGNLGYRASAKKAQICQKQVKYLGYLLKEGQRWLTEARKETVMGQPTPKTPRQLREFLGKAGFCRLFIPGFAEMAAPLYPLTKPGTLFNWGPDQQKAYQEIKQALLTAPALGLPDLTKPFELFVDEKQGYAKGVLTQKLGPWRRPVAYLSKKLDPVAAGWPPCLRMVAAIAVLTKDAGKLTMGQPLVILAPHAVEALVKQPPDRWLSNARMTHYQALLLDTDRVQFGPVVALNPATLLPLPEEGLQHNCLDILAEAHGTRPDLTDQPLPDADHTWYTDGSSLLQEGQRKAGAAVTTETEVIWAKALPAGTSAQRAELIALTQALKMAEGKKLNVYTDSRYAFATAHIHGEIYRRRGWLTSEGKEIKNKDEILALLKALFLPKRLSIIHCPGHQKGHSAEARGNRMADQAARKAAITETPDTSTLLIENSSP

SEQ ID NO: 8371 - protein, 1020 aa, synthetic construct
MDEYQRSLSRPLLTIMSINIEGLSLAKEELLAKMSEDISCDILCIQETHRDITMRRPKILGMQLAVERPHRQYGSAIFVRSGVAISATSLTEVNNIEILSVELDSCTVSSLYKPPGADFYFTPPTSCHNHEAHFVVGDFNSHSCVWGYDEDDRNGEAVLTWADNSRMSLLHDSKLPPSFNSGRWKRGYNPDLIFVKESISHQCTKRVLNPIPNTQHRPICCVAYAAVRPKSVPFRRRYNFNKANWTKFTETLEAAISDIEPSIENYDLFVEAVKRSSRLSIPRGCRTSYLPGLNEESLNQLQEYLRLFQENPYSDGTIAAGQKLSTALANAKKDRWIELLENLDMSKSSRKAWQLLRRLDSDPLVNPGHANVTPDQIAHQLIQNGKTNCSRIKMKINRVPELETHQLSSPLNLKELREAIKRCKTGKAPGLDDLMMEQIKHLGAKAENWLLKFYNQCLAHKQIPRAWRKTKIIAILKPGKDASNARNYRPISLLCHLYKVYERMLLNRLGPVIEPKLIAQQAGFRPGKNCTGQILHLTEHIEEGYEKGCITGTVFVDLTAAYDTVQHRKMLHKVYHITRDFDFTKTVQTLLENRSFYVEFQGQKSRWRRQKNGLPQGSVLAPTLFNIFTNDQPQPPLTKSFIYADDLGLTTQAKDFETVEKQLTNALKDLSSYYKENHLKPNPAKTQVCAFHLRNREANRKLKVTWEGQELEHCFHPKYLGVTLDRTLTYRKHCMNTKHKVAARNNILRKLTGSAWGADPQVIRTSALALSFSTAEYACPVWHKSAHAKQVDIALNETCRIITGCLKPTPVDKLYKLAGIAPPDVRREVAANGERKKVEHCESHPLHGYHPPPTRLKSRKGFMRTTTPLDVPPAAARVSLWAAKPGNSNWMAPQEGLPPGANQEWATWKSLNRLRSGVGRSKDNLARWHYLEESSTLCDCGAEQTTQHMYACPQCPASCTEEELFKATDNAVAVARFWSKTIGGGSPKKKRKVSGSETPGTSESATPESVSGWRLFKKIS

SEQ ID NO: 8372 - RNA, 1351 nt, synthetic construct
  source 1..1351: mol_type = other RNA
agggggacacggaaagagcctccccgaagattgagtgaattcagtcgggcgtcccctgggcaacgtttcttgtaagcggccgatctttccaccccaaaagcattggatgagtttacggatccgaattctcgacggatcgatccgaacaaacgacccaacacccgtgcgttttattctgtctttttattgccgatcccccggccgctttacttgtacagctcgtccatgccgagagtgatcccggcggcggtcacgaactccagcaggaccatgtgatcgcgcttctcgttggggtctttgctcagggcggactgggtgctcaggtagtggttgtcgggcagcagcacggggccgtcgccgatgggggtgttctgctggtagtggtcggcgagctgcacgctgccgtcctcgatgttgtggcggatcttgaagttcaccttgatgccgttcttctgcttgtcggccatgatatagacgttgtggctgttgtagttgtactccagcttgtgccccaggatgttgccgtcctccttgaagtcgatgcccttcagctcgatgcggttcaccagggtgtcgccctcgaacttcacctcggcgcgggtcttgtagttgccgtcgtccttgaagaagatggtgcgctcctggacgtagccttcgggcatggcggacttgaagaagtcgtgctgcttcatgtggtcggggtagcggctgaagcactgcacgccgtaggtcagggtggtcacgagggtgggccagggcacgggcagcttgccggtggtgcagatgaacttcagggtcagcttgccgtaggtggcatcgccctcgccctcgccggacacgctgaacttgtggccgtttacgtcgccgtccagctcgaccaggatgggcaccaccccggtgaacagctcctcgcccttgctcaccatggtggctttaccaacagtaccggaatgccaagcttgggtcctgtgttctggcggcaaacccgttgcgaaaaagaacgttcacggcgactactgcacttatatacggttctcccccaccctcgggaaaaaggcggagccagtacacgacatcactttcccagtttaccccgcgccaccttctctaggcaccggatcaattgccgacccctccccccaacttctcggggactgtgggcgatgtgcgctctgccctagttgcttgtgatttcttttcttttttattttatttccattatttgaaatgtatttgttgtagcaatgcttttgacacgaaataaataaaagaaaaaaaaaaaaaaaaaaaaaaaaaaaaaaaaaaaaaaaaaaaaaaaaaaaaaaaaaaaaaaaaaaaaaaaaaaaaaaaa

SEQ ID NO: 8373 - RNA, 101 nt, synthetic construct; identical to SEQ ID NO: 8281
  source 1..101: mol_type = other RNA
